United States Patent Application Publication US 2025/0051766 A1 - sequence listing, part 21

SEQ ID NO: 5065 - DNA, 58617616 bp, Homo sapiens (residues 41,249,438-43,420,460 of 58,617,616)
  source 1..58617616: mol_type = genomic DNA
gagtgagactttgtcttaaaaaaataaaacacacatggctgggcgtggtggctcacgtctgtaatcccagcactttgggaggccaaggcgggtggatcacatgaggtcaggagttcgagactggcctgatctgcatagcgaaaccccacctctactaaaaatacaaaaattagccaggcgtggtggcaggcacctgtaatcccagctactcgggaggctgaggcaggagaatcgcttgaacctcacaggcggagattgcagtgagccgagatcgtgccactgccctccagcctgggcgacagagcaagactccgtctgaaaaaaaaaaaaaattaaaacacacacacgcacacatgggcgacacaaccaccaccaagggaataccagaagcagagagagggtgaaataccctggcttctccctttctccccgctacctgccagtctcccataagggcctacctcccattggcaaatcccaagaggaaaccactaggaaagggagcctgggaaatgtagttttcaggggccggcccactgtgatacatagtggagcaggagaagctctagaatgaggcatacctggctgaatcatttaccagctatgcgatctcaggcaaatgactttccctctctgagcctcccacctgtcatctggaaaaaaggaccctaatgtccccaccttccaaagctgttttgaggcaaagcacttcatgctgagggtggcaagtaggacatgcttgttaatgtggagtaggactatattatttccattatcagagagggcaggagccatttcagggttacacagcacaggaagtccagggctaagttcttcacacacagggaaggagaagcatagggcattcagattggggctggtggtgaatagagaatgatcctttctgaattacagggcttaaaagcttgggctatgaagtcattacccactcattcgttcattatggagcacctcctgtgtaccaggttattttgtttgttttgctctgttttgttttgttttgaggaggagtctcactctgctgtccaggctggagtgcagtggcatgacctcagctaactactacctctgcctcccaggttcaagcgattcttctgcctcagcctcctgagtaactgggactacaggtgtgcgccaccacgcccagctaatttttgtgtttttagtagagacggggtttcaccatgttggccaggatggtctctatctcttgacctcatgatccacctgcctcggcatcccaaagtgctgggattacaggtgtgagccaccacacccagcctacgttttttgttttttgagacagagtcttgctcgttgcccatgctggagagcagtggcaggatcacagctcactgtagtctcaacctctgaggctcaagcgatcctccccactcagcctcccactggttatagtcttggcctgggtctgaatctcagccgtgcaaccttgggcaagtcattttgcctctgtgagccacagtgtcctgaactgttaaatgggatgatacttgtttgggtccccagggcaggtagggaagtgctgggaagcagcctgggcagttgtgagcaggtggaccctggagccagactgcccgggtttgagatctgcctcttccacctccaagctgtgtgttcccttaggcagactcctaacctttttgtgccttgctttcttcatctttaaaatagagataggccagggacagtggctcatgcctgtaatcccagtgctttgggaggccgaggtgggaggatcacttgaggctgggagtttgagaccagcctggacaacatagcaagactccctctcaaaaaattggctgggcatggtggctcacacttgaaatcctagcactttgggaggccaaggcaggcagatcacttgaggtggggagtttgagaccagcctggccaacatggtgaaaccccgtttctactaaaaatacaaaaattagctgggcatggtggtgcatgcctgtaatcccagctactcgggaggctgaggtacgagaatctcttgaactggggaggcagaggttgcagtgagccaagattgcgccattgcactcaagcctgggggacaagggcgaaactccatctcaaaaaaaaaaaaaaaattatccgggatggtggtgcgtgcctgtggtcccagctactcaggaaggcaagcctaggagttcgagcctaacctccagtgagctatgtttgctgtgattgcatccatcctgggtgacagcgcaagaccctgtctcaaaaaataaaaataaaaaacaaaaacaaaaacaaaacaaaacaaaacaaaaaaccaataaaatgggaatgataatagtagcacctgagaagattaaatgagttaatatatataaagttggccaagcgcagtggctgacgcctgtaatcctagcactttgggaggccgaggcgggcagatcgtgaggtcaggagatcgaaaccatcctggctaacaaggtgaaaccccgtctctactaaaaatacaaaaaattagccgggtgtggtggcacacgcctgtagtcccagctactcaggaggctgaggcaggagaattgcttgaacccgagaggcggaggttgcagtgacccgagatcaaaccactgcactccagcctggacaacagagtgagactccatctaaaaaaaaaaaaaaaaagaaaatatatattttatatatatatatatattatatacacacacacagacacacacacatacacatatcacatataaagtgctgagtatggtgcctggtacttactaatcatgtttgatgaagatgagtgatgatgatgatgatgatgatgatggagtggaggtggagggagagtcctccctctcctcccctcctcctcacgacctttctctctccctcaagttgccatctgcacgaggtcagagctggaggatttcctgagtgaagcggtctgcatgaaggaatttgaccatcccaacgtcatgaggctcatcggtgagagaggggcagattcaaggggtctacaagccccatgggggccatagcagagggaagagccctgcttctggccctgggaagatcaaacttccaggcttcctgctccccgctccttcagggtcagcaggcttccccctcctagtctccctcagcttggaatgtgacctctgatcattcccagaaatagctgaggtccccaggagggctccggaaacgtccctgggaactctgctggaaacagcttctctgcagcttggtccttgccactgccactacccccaaacaatatggtggccagattggatgggtagtgagaaggagaggctggaggctggctggtggggggcttggcttccccttctgcccagcaggagtgacagggctacctggggggctcaggtgtctgtttccagggttctgaacgagagagcttcccagcacctgtggtcatcttacctttcatgaaacatggagacctacacagcttcctcctctattcccggctcggggaccagccagtggtaaggggcgtttaatcattcagtctacaaatattaactgagcatctatcaggtacccagtgctgctcagaccctgggaagaccacggtgaccaggagcttgctctcctggagcatttcttccagcaggggaggggcggatgataaacaagctaataaatacctaagcgagatgatttaaatgtttaagtgctaggaaggaaatacagtaggatggaagataaggaggccaggcagtgaatttgggtggacgtggaagatcttgccgaggaggtgaccgtgaaggagttggggctggggagatgtctggagatctgggcaggaagcgaccccaacagagcgcacagcataggcaaaggctcggaggtgggaatgatcatcgtttgtctgaagaccagacaggagtctggtgggagtgtcagtcaagggcaagaacataggcaatcaagtccaagaggaaggctggagcaagtttataggaccttgcaggccatggagaggggttgggttgaattgtcagggccatgggaaaccactgcgggcagagctaggcttgcacagagggatggagggaggagggatcgcatcaaggactctgttgacctctcctcccacctgccttggctccccagtacctgcccactcagatgctagtgaagttcatggcagacatcgccagtggcatggagtatctgagtaccaagagattcatacaccgggacctggcggccaggaactgcatgtgagtgcctttcagggaccccccccccccaactgctcctgcactccctgagggagttccctccctccttcttaggatggaagcagggctagacacccgctgagggcaggtcagaactcaggaccaggaaagtcagtaagggggtctgggaaggcttcctggaggaggtgagtcctgaactgagatctggaaggagcatttggatgcggagagggaagagaccagaaggtgggctcagtgcacagcatgaggtgagcaaaggggctgaggtgaccgatgggggtggggacacgtgagctgcatctctgtcccactccatgctgggtgtcttgcctggggctgccctttggaagcggccacactggataagaaaatcaaactccccaccaatggacaagcagaaaatatgccagatggggtgcagtggctcacgcctgtaatcccagcactttgggagtccgaggcgggtggatcacttgaggccaggagttcgagaccagccttggtgaaaccccctgtctactaaaagtacaaaattcagcctggtgcggtggtgtgcgcctgtaatcccaacacgagaattgcttgaacccaggaggcggaggttgcaatgagccgagatcgcatcactgcactccagcctgggcgacagagcaagactctgtctcaaaaaaaaaaaaaaaaagaaagaaagaaagaaagaaagaaaaaagaaaatagtaacctgtagtcccagccattcccaaggcttaggtgagaggattgcttgagcctcgagaccagcctgggtaacaacaacgagacaccatctcaaaaaaaaagaaaaaaagaaaagaaagaacaaaaaatcccccaaaagccagaatagagggtaaggggagggtagaaggtggagggaatggaaccacagagttagaatattagtcttggccaggcgcagtggctcacatctataatcccagccctttgggaggctgaggcaggaggatcacttgtacccaggagttcaagaccagcctgggcaacatagtgaatcctgtctttacaaaaaataaattagctgggcatggtggtgtatacctgtggttccagctacttgggaggctgaggtggaaggattgctagagcccaggaggttgaggctgaagtcagccatgatggtatcacttcactactgcctgggcaacagggcaagatcccatctaaaaaaaaattgatgtatattttacatacactaaaatatacacatgcagctcagctcgatgaatttttatgggtatagacccatgtaaccactagatgaaggtaaagaatatttcttagccccagcaggctccttcatgcctcttcgtcttcccaatcactaccgccaagtggtacccactatcctgacttctcagtgctagtttagcctgttctgaaaagtcatacaaatgggatcatgcagtttgtactgctttgtgtctggcttctatggctcagcatgatgtttttgagatggatctgtgtaggggtagtttgctctttttctttgctgtgtggtatggtattccatcatatgaatgtcctgtggattttcttttctttttttctctttctttctttttctttcttttctttctttttctctctgtcctttcttctttcttttctttctctttctctctctttatctccttccttccttccttccctccctccctctctctttccctttctttccctttttttctttcttttcttttttgttttgacagagtcttactctgtcctttagggtggggtgcagtggcatgatcatagctcactgtagcctccaactcctggctcaagctatccttctgcctcagcctcctaagtagctggaactacagacatgtgccaccatgtccagctaatttttaaatttttttgtagagacagggtcttgctttgttttccaggctggtcttgaactcctagcctcaagtgatcctcccaccttggcctcccaaggtgctgaaattacaggcttgagccactgtgcctgtttttttttttgtttgtttttgagacggagtctcactcactctgttgcccaggctggagtgcagtggcgtgatctcagctcactgcaacctccgcctactgggttcaactgattctcttgcttcagcctcccaggtagctgggatttcagatgtgcaccaacacacctggctaatttttgtacttttagtagagacagagtttcaccacattggccaggctggtctcaaactcctgacctcaagtgatccacctgccttggcctcccagagtgctgggattacaggcgccagccaccatgcccagccatgttctgtttcttaatctgggtgctggttacatgggtgtgtgtgtgtgtgtgtgtgaaaattcagtgagctgcttacttatgacttgtgcacatttccatatgtacagtatacttcaagaaaaaaaaatttcatcaaggaatcaaacccaaggaaggaccttagaatctagcaaagagccaaaattgggaagtcctgaggaagccctttgtcccatcctcacttgacagagtgaacaagaagtaaagcagttcccttctggactgggatgaaggtttaggagacagatccccacccgcagccaggacagtgaggggaggaggtgcagatgtgtctgagagccagggcaggcttcctggtggaggtgactgatgccctgaccctgttcctttccccaatccaaacaggctgaatgagaacatgtccgtgtgtgtggcggacttcgggctctccaagaagatctacaatggggactactaccgccagggacgtatcgccaagatgccagtcaagtggattgccattgagagtctagctgaccgtgtctacaccagcaagagcgatgtggtaggtgcactcccgccaagagtggggaaccatgggagggcatggcctgaccatcacacactatgcctgggtggctgtggatgcaagggtcacagggacatgtgggcttccctttgcaggggcttgtccacatgggctgggcatgtcttggggtatggtgggcatctctgaatagtggtgtgtacatgcccaggataaatacaggcccacgtgtgcatggtagcaatgtagacagtttaggttagaagaagctgcagtgattatgcgtgcatgtgcgcacactcatagaatgtggacagccagggtgtgcagagtggcacatgagctcatgtgtccatgaagtgtgtatatgtgtgtgatggtgagcatgtgtatgcatccacaaaagttacttattcatgtgtatacccgtgtcaagtattttttatatatatatatttttctttttttgagatggagtctcgcactgtcacccaggctgcagtgcaatggcatgatctcagctcactgcagactctgcctcccgggttcaagcaattctcctgcctcagtctcccgagtagctgggattacaggcgcccaccaccatgcctagctaatttttgtatttttagtagagacggggtttcactatattggccaggctggtctcaaactcctgacctcaggcagtccgcccacctcagcctcccaaagtgctgggattacaggcatcagccaccgcacccggctaaagtattatgtttctatgaatacttgtgatgctcccagaggatggttgtgaacatgtgtacataagtgtgggtgtacccatgaacctgggtattggtgcgggtgattctgtgcaggagagactgtctaattccctctgcccctcacagtggtccttcggggtgacaatgtgggagattgccacaagaggccaaaccccatatccgggcgtggagaacagcgagatttatgactatctgcgccagggaaatcgcctgaagcagcctgcggactgtctggatggactgtgaggacccttaggtctcccccaacccagaattcattccaaacccctgactacccccagatggccctcacaggtccaggactctctataacccagacagaatccctgagaatgctgagtgacccacttgcccctcaccaatgctctgagtagggccatcactaaccagtggggtgcaaatcagctaaaggcaccctttcctcctttgtctgtgtgggctgaatcagccccctggctccccacccccaagccaggtatccttgggtagtgaataacagcacagtcttacctggcggccctgcctttgggacatgcactcccagagacttctcattccagactcctgagcacaccatgcttccccgacatgctcctcaacacctgagactctctgcaaaacccttcagtttgttttattggccttctccagactcaggtctcctctgagatatttgcaggatccttcagggaatgcttaccaaactttgcaatattggagtatgcggagaaggccgtgacatttagctagcactttgagggtaaagagaggatgactttgggtcaggaggagacagcctggggcgtcagactcctcagtccaccttgggtactccaagagctgagacgagtaaaaataacagctaacattttcatataactgactagaaggcactgttttaggtgcctggcatgtgtcaaatcatttggtccttaccacagccatgtgatgtagataggtatcattatgattcccattctgcagataagaaaacccagtcctacagggagggtaatttatttttatttattgacttgagtctcgctctgtcgcccaggctggagcacaatggctccatctcggctcactgcaacctcccaggttctagcgattctcttgcctcagcctcccaagtagctgggactacaggcgtgtgccaccatgcccagctaattttttttgtatttttagtagagatggggtttcaccaccttagccaggatggtcttgatatcgtgacctcatgatccacccgtcccagcctcccaaagtgctgggattataggcatgagcctccacgcccagtctgggagggtgatttatttgccaaagattgcacagctggtgtgtttgttatctatatccccaaatcaagtagtttaaaacaacaaacgtttattatctcacacaatttctgaaagttggatactgggaacagcttagcagggtgattttggttcaggatctctaatgaagttacaaagatatcactgggggctgcagtcatctgaaggttgggactggaggattgctttcaaggtggcttactcacatggctgtagcaggaggcttcagttcgttgccatgtggacccctttgtggcactgcttgagcttactcacaacatggcaacccaggagaaagtgcgaggaagccacatgccttttatgacctagtctcagaagtcacacacaccatcacttctgccaaatcagaagcaagtcactaagtcctgcccatgctcaagaggagaggatttattctccgtcttttgcagggaggagggtcaaagaatttatggacctattttaaaccagcacagcttgtaagtggcatagccaggctttgatgcaagtctgttctggggagctggaaggtctgttctagcaaaccctcatcagaatactactccatatacagacaggtttcccgagacccttcccagctcctgagtctcccaggacccaactcagaaattcttgggaattcccaaatccccatagatggcctcaaactgctgaggctccctataaccctctaaaatgcccccagtcccctgagtgtcctaaaatgtccccaggcttccagaatgcaccccttctgagtccctgctcaatctcccacccctcattttgctgccctaggtatgccttgatgtcgcggtgctgggagctaaatccccaggaccggccaagttttacagagctgcgggaagatttggagaacacactgaaggccttgcctcctgcccaggagcctgacgaaatcctctatgtcaacatggatgagggtggaggttatcctgaaccccctggagctgcaggaggagctgaccccccaacccagccagaccctaaggattcctgtagctgcctcactgcggctgaggtccatcctgctggacgctatgtcctctgcccttccacaacccctagccccgctcagcctgctgataggggctccccagcagccccagggcaggaggatggtgcctgagacaaccctccacctggtactccctctcaggatccaagctaagcactgccactggggaaaactccaccttcccactttcccaccccacgccttatccccacttgcagccctgtcttcctacctatcccacctccatcccagacaggtccctccccttctctgtgcagtagcatcaccttgaaagcagtagcatcaccatctgtaaaaggaaggggttggattgcaatatctgaagccctcccaggtgttaacattccaagactctagagtccaaggtttaaagagtctagattcaaaggttctaggtttcaaagatgctgtgagtctttggttctaaggacctgaaattccaaagtctctaattctattaaagtgctaaggttctaaggcctactttttttttttttttttttttttttttttttgcgatagagtctcactgtgtcacccaggctggagtgcagtggtgcaatctcgcctcactgcaaccttcacctaccgagttcaagtgattttcctgccttggcctcccaagtagctgggattacaggtgtgtgccaccacacccggctaatttttatatttttagtagagacagggtttcaccatgttggccaggctggtctaaaactcctgacctcaagtgatctgcccacctcagcctcccaaagtgctgagattacaggcatgagccactgcactcaaccttaagacctactgttctaaagctctgacattatgtggttttagattttctggttctaacatttttgataaagcctcaaggttttaggttctaaagttctaagattctgattttaggagctaaggctctatgagtctagatgtttattcttctagagttcagagtccttaaaatgtaagattatagattctaaagattctatagttctagacatggaggttctaaggcctaggattctaaaatgtgatgttctaaggctctgagagtctagattctctggctgtaaggctctagatcataaggcttcaaaatgttatcttctcaagttctaagattctaatgatgatcaattatagtttctgaggctttatgataatagattctcttgtataagatcctagatcctaagggtcgaaagctctagaatctgcaattcaaaagttccaagagtctaaagatggagtttctaaggtccggtgttctaagatgtgatattctaagacttactctaagatcttagattctctgtgtctaagattctagatcagatgctccaagattctagatgattaaataagattctaacggtctgttctgtttcaaggcactctagattccattggtccaagattccggatcctaagcatctaagttataagactctcacactcagttgtgactaactagacaccaaagttctaataatttctaatgttggacacctttaggttctttgctgcattctgcctctctaggaccatggttaagagtccaagaatccacatttctaaaatcttatagttctaggcactgtagttctaagactcaaatgttctaagtttctaagattctaaaggtccacaggtctagactattaggtgcaatttcaaggttctaaccctatactgtagtattctttggggtgcccctctccttcttagctatcattgcttcctcctccccaactgtgggggtgtgcccccttcaagcctgtgcaatgcattagggatgcctcctttcccgcaggggatggacgatctcccacctttcgggccatgttgcccccgtgagccaatccctcaccttctgagtacagagtgtggactctggtgcctccagaggggctcaggtcacataaaactttgtatatcaacgagcttctgtctcctcttgtctccttttagctgtgatgtggccccattccctggcaattcagttcccccatcagaaaaaagaagggcttggtagggtcttggaattctgtcctcactagagagggtagaaatgaacacacagatagacaaaaagacatacaagcaaagagatgcaggttctcagaaacccccagtgaggaactggcatacagatccaggatcacagacacacacacacacacacacacctgttccgccgcaaactaacagacacatgaattaatggacacacccaggaggacctggtcacaaatacagagactgaaactcagacgcatagagtaacacagacacacagaattacacagacacaagcatatttacaaacatgctcaggcagatacccgccacgaataggaagagacacagacctagagtcaagtgacacaaatactcaagagacatgtagagtacaacaggtactcacaaccccgaacgttcagactgacatagaaacacaggcacagaacacctccgatcatcacggacccacaaagggcctccagcgaagaccagcccaccgtgtctggcacgcactcgcgagcgggcgttcgcgggtgtggccggcagcaaatggagaaacccttggcagcgcccggacgccctccagtggcggctcctgagaaccggggacagttcaatccgggccacaaacttttttagaacaaatcattgtgggaagctgggaggagagagagagagaggaagtcggacgtgggcgaggggcggggtgtctggactggaacctctgggcccacgtgagtgtctgtcccgctgctgagtgggtgctgtgtgtttgggttgctgtagtgttcgcttgtagtgcaactatcctgtgttatctttattattcgatgccgcctgcctctgcggaccgtagtgggcacatctacactgcagcggggtgccttacccaaagcagatcggaattggggccgggcgcggtggctcacgcctgtaatcccagcactttgggaggccgaggcgggcggatcacttgaggtcaggagttcgagaccagcctggccaacatggtgaaaccccgtctctactaaaaatacaaaaattagtcgggcatggtggcggggacctgtaatcccagctactcggaaggctgaggcaggagaatcgcttgaacacgggaggcggaggttgcggtgagctgagatagaggccctgcactccagccagggtaacaagagcgagactccgtctcaaaaaaaaaaaaaaaaaaaaaagaacaacaaaaaaaagaactggatgcgtctgatctgacgcacgcctgtttgtttacgactgcggggtgtgcctttgtctgagtagagatagtgtgtggcttttgcgggcttaacgtgtggctcaggaggcagtgggagtctgcatcatgtatcccgattgcgtcttactcgagttttgttttgagttagaggcgacaggtggtgcagcgttagacactgggaagctctgtggcttttgtattcctgagcgcgaaggttaatgacggatccgtggggttgagcttgtcggtacagacgccagacagcccgatttacgggaacagccgattagaggattcgggagagcggtcggtgaacttctggatgtctttcgggaggggaaggctctatggtcgcgtgcagagcgcccgttccacgtcaggtacccgaccatagagcaaggcggccgcggactacccaagggaaggggaggccgtgtcctttacaacttgcctcccgttgttagtctagtttctatagccaaaccttcgggactctctcaactcaaaattttgcttttcctaaaggcaactgggttccttccagattacgaactgtgtatccacttaatctctatttcgtatacctcctcctacagcgaaatttgtgaggcagtcctctgaagcacggccaatctggtgaacttttcctaaaatgagccatcgctaccagctttagtgagctaagacaataactgcgattggtgggcagattgttttgaaaccgccctaacggcaaggggcgggctcctggtgaattcatctctttccggtttcttaaaggcaacaggaaggaggggtttctgccgaccctccatttgattggttctagtggttttacccgctcggactcctcaaggggcgggagatgtacaccaatcggaatgtgtgttacagagacacttagtttgatgaaaggactgcgcaggaaaggccgtgggacactcattctgagatcttaccgttgattggaccaaattgttactcccttattttcattggaccttacggcagccggcgcgcgagagttacccaatcagcaagcgctccgcctcctgccttttcccgccctccgctccggcctcggcttcgacgtaggccaacgcttcctccccagtagctcctaggccttctcgtggccgttgttttgaaaacggcgctctgattggctaggtttccgggcccgcgcccgttgccccacgcactgaccaattggcactcatgtaacatcggacgaggcacgagtgaggggggaggcggtggcggcggccattttgagccgctgccgccattggagtgggccccccccctttcccccttcgcctcctgacaggaaaggtttaagggggacagagccctgggaggccgggccgggctcgggggccaccccgggggcccgggccatggatgtgcgccgtctgaaggtgaacgaacttcgcgaggagctgcagcgccgcggcctggacactcgaggcctcaaggccgagcttgctgagcggctgcaggcggcgttggaggccgaggagcctgacgacgagcgggagctcgacgccgacgacgaaccggggcgacccgggcacatcaacgaggaggtcgagaccgaggggggctccgagctggaggggaccgcgcagccaccgccgcccgggctgcagccgcacgcggagcccggcggctactcggggccggacggacattgtgagagtgcgcggggcgggggccggggagcccggagcctgggccgaggaaagggctgtgggacgcgggagtccagcgcctgaggtcggggagacgacctgaggatcgggggatcccgctacccgccgccgaaaaggatctggggaccagggccccagcacgaccggagggtggatcctgacactcagtgcaggggggacactgggggaggggcctctgggtttcggaggtgagggacgggggtggcggggaggattccgtaccgtagggatcggagaccggaaactgctttctggagccgaagagagtcggaagaacaagaggttttccgtttgggttggggagggtctcgaaaatggggatcctagggtacggagctccgtgggcttggcggtcgtgctagcccagcgtgtgggctggggggtggggagccgtgtttccagggtggggaaggaatgtccaggtgtgcggggctgcgagagttctgaggaaggaggatcctggaatatgccgctggatgcgatcctgggcgttctcctatttgggtacgggggtgggtgggagaggtggaggcgctggtgtctgtggctggggagggtcctaatggactcagtgctttggagtttggctagtgagcatttaggggctgcgggagattgaactagggggcacccccatctctcttccggggctggaaggccacccttgaagcaggcacagcctggacattaggtgctgggagatctggggactttctggttggcttctagaagaggtatagggagccctggtgtccagaggctggcgggggagaggatgctttcctggacaaaggatctgggggtctagagctaagaaaactgagggcaaataactcttgaggctgctgctgactggtctggagctaactgtggggtttttggagaacagagggtagctgggggtgggatgggggcagatgagttggtaacattccaagtggatgaaatatgtggcgggagacagaggatcctgtgtccagcacaggagtacgtatctggcttagcgaatatggggaggggggaggccgtagggagcaaagagaaagaaacctgttgacttcactggaggcctcagagtggagtgtggggaatgtttctggacctgagcgtctccaggagaaatctcgacggttcccagaagcagttatttgtgtacccagggagtgggggccctcggggagcagcacggaactcttcatcagccaggagctgtgactctgggaatgggttcgggtagacctgcggttgtctgaggagaggaaaacctgatatgggacggcgtgaatcttcagttagaaaaaaagcagctttcgggccgagtgcagtggctcacgcctgttattccagcactttgggaggccgaggcgggcggatcacgaggtcaggagttcaagaccagtctggccagcatagtgaaaccctgtctctactaaaaatacaaatattaaccggatctggtggtgtgcgcctgtagtcccagctactcgggaggctgaggcaggagaatcgcttgaacttgggagggggaggttgcagtcagccgagattacgccattgcactccagcctgggcaacaaaagtgaaactccgtctcaaaaaagaaaaaagcagctttctttctcttttttttaaatacagatggggggtctcgctatgttgcccagggtggtcttgaactcctgggttcaggtgatctcacctcggcctcctgaagtgctgggattacaggcgtgaatcactgcaccaggcctcagggcagctttctagtaggactgggaaatggggggactggaaaggttaaggagtaagtagaagggattctggcgtaagagtttgtggagtttttctgaaaagagggcaccctgggacttggggctaaggggataaggagagaaatgaggtaacagaagagacaggatttggggttggaattggatacttgttcataagagaatttcccggagggaggagtgtggatttggggtaggcagtggcctagagattatcgaggacccaggtgctggaaagaggacttcccattgcagagacttgtgaagaaaggagtgggcctgtgtgtgtgtctagagcaggagggatcgtggcaggaatgcctagcaagaaagggtagtgggttagtagtgacctggtggtctgggcagagagtcatctctgagaggaaagcgaattaggtgctttggagcgtagactctagactaagacagacttcgtttcaaatctggcttaaagatattggcaagtcacttcacctctgtgggcctggtttccttaatgtgtaaaatggggttaatcaacaaatagtgtgttcacagcccctccaacccctgaggggtgttatgaatgagatcacatgtgaagggcttatcactgggcctgccttttatgagaagagggatgttttagagaatggagaaggaccctagaattatagcttctccaggaggggctgcctctgtgaacacaggagagagatgctggggaaaagaggctttgtgggaagaggagcattgtgcttggagcctggaagcagcagaatagtttgaaagggccccatattccaattaaggagataatgctatttcttcctctctcccttacttgctacaacaaagtcctttgagcccccttcatgcctcccttaagccctccttcaaccttggtaaacagaccggtagcaaaccacatgacctgtgactttcctccctttgggctgcacctggtttgtgcccagatgtatttatcctctgagaaggaatccgatcagttagcaagtggcagaatagtctctccttccctttggttctggctcacggctcctggcatagccactggtagggcccttggggccctaactgagagctagcccctggggaggagagcctgtatgctgcccatcctagctttctaaagttctctctgggtttggctgcaaggttcttgagggaatttctggttttagttccacctctgagctttcacacgtgttatcccaaccccagtaacattctccattctcatcactgagtcattacctgtgtatcctttgaatcaaggcttatctgttattttccaggtccctttcttcattcctggtactactttgtagccttcaacacaatcatattaaatttttgtgtgtctttaagatttgtctgtctcactaaactgaaggcttcagtggggcaagcttgtcttcagctgtatcccaggctctggagtatagtatgcatgccatgaatagttaatattattattcttaccactcttagttgagctcctggacctgcagatgccttctggatgctttggtccagggttcttcatgaaccgcccctctaattggccatttttaattttgttttaagatgccatggacaatattaccaggcagaaccaattctacgatacccaagtcatcaaacaagaaaacgagtcaggctacgagaggagaccactggaaatggagcagcagcaggcctatcgtccaggtaggaaaatacacatggttcatctctttggatggaaacaatctacatggagcctttaccccctgcttagagcgggtcttcccagagaaactgtgcatcttttttcttgggcagttcatctaaacattgtcactctggcaagaattgtttaaaggaaagatctcagtcctatttccaagtgttgggagaggggaggttccatggtatctgtaaaaaagtgatgttagtatcagccgggtgtggtggctccctcctgtaatcccagcactttgggaggccgaggcaggtggatcacctgaggtctggagttcgagaccagcctggccaatatggtgaaacccgtctctactaaaaatacaaaaattagccaggcatggtggcaggcacctgtaatcccagctacttgggaggctgaggcaggagaatcacttgaacccaggaggcggaggttgcagtgagccgagatcgcgtcattgcacttcactcagtctgggcaacaagagtgaaactgcatctcaaaaaaaaaaagatgttagtataagcaccctggagagttgagacccctagactaatacttgaatcttatttagaatcttagaatgggggagccagaaagagccttctaagtctaatctggtatttctcatgttctgaagattattgtttcaggggatattattaggggattctcagaaaagggttccttagccaaatgtgtctggaaactgtagcatgtgctatatcgtctcttggaaattcactgtgcttgttagaacattaaaggctctgagaagtccagaatttaaaaaaaaaaaaagaaagtgtgtgtcaggcctcaggccaggtgcgctggctcatacctataattccaacactttgggaggccaaggtagtaggatcatttgagaccaggagttccagaccagactgggcaacatagtgagaccccttctctacaaaaaatttaaaaattagccaggcatggctatgactgactacatgcacacacctatagttaaagctactcaggagacaaaggtaggaggatcacttgagcccaggagtttgaggctgctgtgagctatgattacactactacactccagcctgggtgacagtgcaagaccctgtcacgaaaaaaaaaaaaaaaaaaaaaaacctaaaattaaaagtaggttagaacacagtggctcatgcttgtaatcctagcgctttaggaggccaagtcaggaggatcacttgagcctaggaatccaagactagcctggcaacatagtgagacccctgttgtctttagaaaaaattaaaaattgcctgagcatggtgacatgcttgtagtcccagctactcagaagactgagtcaggaggatcacttgagcccaggagttcaaggctgcagtaagctatgatcgtgcacggcactgcagcctgggcgacaggaagaccttgccttaaaaataaaaacaggccgagtgcgatggctgttacatgcctgtaatcccaacactttgggaggctgaggtgggaggattgcttgagtccaggagttcaagaccagcctgggcaacataaccctgtctctataaaaaataaaaatattacctgagcatggttgcacaatcctatagccccagctactctttttttttttttgagacgaagtctcgctcttgttccccaggctggagggcgatggcgcgatctcagctcactgcaacctccgcctctcgggttcaagcgattctcctgcctcagcctcccaagtagctgagatttcaggcgcctgccaccacacctggctaatttttgtattttcagtagtgacggggttttaccatgttggccaggctggtctcaaactcttgacctcaggtgatccgcccgcctcagcctcccaaagttctggggttacaggcgtgagccactgaacccggccaagtcccacctactctggaccctgaggtgggaggatcacttgagctaggaagttgaggctccatgagccatgatggcagcactgcattccagcctgggcaacagtaagcctctgtctccaaaaaaattttttttttaattaaatttaaaaaccttgtgtcttcttgggctggtgttgctgaaaatattttttttaataaaaaaatagacaaaaaaccttgtgttgtatcgtttaaacttaggatttcccaatcatgttaagtatatgtctttacagaacaaagttccccatgatgccaactctcccttcccttttttttttttttttttttgagatggagtctcgctctgttgcccaggctggagtacaatggtgtgatcttggctcactgcaacctctgcctcccaggttcaagtgattctcctgcctcagcctcctaagtagttgggactacgggcgtgccaccacacccagctaattttttgtgtgtttttagtagatgtggggtttcaccatgttggccaggatggtctcaatctcctgacctcatgatctgcctgcctcggcctcccagagtgctgggattacaggtgtaagccactgcgcctggcctctcctccccattttatagattgaggagttggcttgtccgatggcagagctggggctacaacctagcatacttgctcccaggctagtcctcttggttaataagcagcattccttatcatttgtgccttactatttggaaagcagggtcccactattgagaactgatggagcccggactgacccccagttttgtgctgcttttactgtgttgtggcctcccagtgccttttcttagtgtatctggttgattttgtctaacgccattctggttcatccacaaagttaaatccccagacatttcttgtgggtggctcagaactttactgaatgtaggttaaaccgcagatttgtgtcaggctctgtgagacttgtaggatcattcagccacaggagaatattttctgtgccgttatccacagacattcatcaggagccctgtgtgagcccaacctattgctgggaaccagggaagctctcttcaggatggctgagcaccatcccagccctagagaaccaggagacttttctgagagatgtggtccacatgccgaagctggggagtgatccaaaatggtctggggttgaatgcagaaatgagtagatgtgaatgagcttcagcatcagggattaatgctgtgggagaaatgaaggtagcctacatctgtggtttgctcttggttaggcactgattcctggagtctgcctgagactaggacttacccgtggtccacagcacggtatcccatcctgactttctgttaatggtatgacttaaagaggttattgcacctatgggatggcttaaccggagtgattctggcctcttttggtagggtaactaaagcccgtagagttagctgcaggaccacagtaccctgttgaattcatcctctccccctcccttgccagactgaagaagctttgtaagaactaaggcagagaggttctttgggaagagaaattggagaatttagggtcatggtatctcagatcctaaccctgttctccagtatggccttcttggctggctcagcaggcttctgttgaactcagcaagctgcctgtgcccagcccttcatcactgtagtgaggatcctgctcacatctctcaagggaaaagggaccagaaaagtgatagctggggagcttgcgagtgtcttgaccatctgaatttgtcttgacaatagaaatgaagacagagatgaagcaaggagcacccaccagcttcctcccgcctgaagcttctcaactcaagccagacaggcagcaattccagagtcgaaagaggccttatgaagaaaaccggggacgggggtactttgagcaccgagaggataggaggtgggtgtatgaggcagcagtcacccttgctctggtaggtttctatatccatagcctcgtgcttgctggggacatttgcactaacctagaggggctgagtaaagattccctctgctttcacactcttcctgtcccttcccgtacttgctaccagattcagctttcctaaacttttggtccttcccccagttcctcccttcttacctgcagggtaacttctaaatatcttagactttcacgcgtgagatgccagcctgcctgttctgtcctttgccttactgcccctgcagtcagctgcttgatacccgtaatgaaagaaatatctgtttcctaacactactcccaaatacacatcctcttcccattcatccactcattcagtcagttctcacagtgctgtcacgaagtgcccactcttgggctggacactagcaacatacagatggacagtgggttttgccttctgttgttccagtgtggggactcagacacatacactagtaagccacaacctctgaggtgagtagtcaggatgcaggtgagtttcaggagttcagaagagggagcagcctctgctttggtcatttcccttccctaacaagcccttccctcctttccctccagaccaagtccttcccttccctccttccttccttcagttcctgtctgaagccttttgcaattatgaaaactaggaatggccactgtactcatctggactagtcatctgacattctatttcctatctggcggagtccaccttctaactagcttgttactgtctgagacagggcctggatctcacaggctatgatttaagttaggacatggatcccacctcatatggggttcttccactgcctcccacagagcagaagcctggaagctacttactgatggagagcaaaggaagaacactcgctctgatcctgggctggcagggaaagtttcctagaatggacttaacatgtgatgagcacagctcatccatgttagccctggcctggcgaggccagaggggccctccaccagagggaagcctgctgctgggagagtcagcagccaaatgggcatgggctccccatctgtgcatgcagtgcactgcgaccacccagactgtccaggcaggaccctgagtgttagattctacctttctacccttcttcctcgttcctgtacagcagaaaccaacagtgttaagtcccttttttagcgttttggtaggaaaatgaatatcgtttataatttaggacactgaaaaaaatgggtcatctcaaattcttacagatgtaggattttaagaagcctggtacatggatagatagtaattattgggatttatataggctcttgcacattccccttcctggccagcacccttttgggataccacagcctccaaacagtaacagagatcagtgtggaagtggttgtcaacatgcagagggtatggatcagaatctttgggtgtaaaaaaagagtgaaaaaattccctaaatgattctgatgccccccttcagcagagcatgccttcttcaatccctgtctccaccgtaggagttgacggtcattgctctccttgcaaggatgtagggtttcagagttcttttgcccacctctgtggaaggaaatggagattcaggaagcagtctggaggccactcatagattacagcagaacattcattttctttcctttgtgctcatccattgttcttgtatgacttaacccctgtttctaatacaggggccgctctcctcagcctcctgctgaagaggatgaagatgactttgatgatacccttgttgctattgacacctgtaagtctttggagtgtgcatctaattctgccttacagtcagtatggggaaattgtggtcttgaccttcaccagaatccctgctgggcaccgtccaaagacattgttagtccacatgtgagacacggcttagctctggagcaagagtactggtttggaggcaaaagacctactcccaactctagcagtgggaccctgggcaagtcattctacttctctgagcttcccttcaggaaggagtaaatctgctgtactaacctcagaggattttcagggagactcctcagtggatataggagcaatctggaaaaccctgaaccgccctgtacacacaggggttgtcatctaatcaggaagggaatctgagtgcagctggggaaacttaactctttgacaaccagttcccgtttccatcagctgctcaagttcctggtgaaaccaatgccactgtgtcctgtgaggcactaacctggcccgccctgctgtctgtcctccagttcagttttctttccactggataagtggctttcaccttcactgtgcatctgagcatttggaggaattattataaaggtcctttcgctcagacctcctagtcaagagtctaagtggtcgagcctatgaatctaaatttttacatgcacccagaagcccaatcaggtctgagaacactgcacttctcaacagagcagaagataagcagcaatttattcatctatttctacagaagcttctgtttataaagcactggctacatgctttagtaagagataaaaatatacacaatctctaatatcacaagctctcgaaaacaacatctacccagagtagaggtaaacattgtttaaaaagtgttgggtggcagtggttcatgaggcagcgtctagatgaaatgcaaatgtacagatcatgacggtcagcctttagagaaaggagagcgcctcatgggagggatggtcaggaaaggctttcttggaggcgtgactggctccttgaatattgagaatattgagaagggtaagagcaacagtaggagagtcctaggcccatgaaaggaattaggagcctatggggcacctgggcattggttcctgggtggcaggtgtggatcagggtcagatccctgtatagctattggaaacagaagtccggttcccaaattgatagaattaccacagagggcggtaggaatatatggtggtggtgattaacctttttgtattctaaaaactagtttgagcctgggtaacatggcgaaaccctgtctacgaaaaatataaaaatcaccctggcatggtggcatatccctgtagtcccagctgttcaggaggctgcggtgggaggatggcttaagcgcaggagaacagaagttgcagtgagccgagatcatgcctccgtactccagcctgggtgacaaagcgagaccttgtctcaaaaaaaaaaattaatttgaaactgctgaggatatggaccctatccctagcaaatacacatccccaccaaagacatgtgttgacaatttctgaggatacccctgaagccccatccttggatcccaccagataaagaaccccagttcctctctgaggtcatacaggccaatttgcaatactgcacatcctccctactcaaagggagagaggttgaggggtgtgctggttccttttgaaactgcccccatgatgtgttcactgtgtactcctggtcagcacttggggaagttccctctgcctgcttctttcttaggacttctaaaacatcagccaggccgggcgtggtggctcacgcctgtaatcccagcagtttgggaggccgaggcaggtggatcacctgaggtcgggagttcgagaccagcctggccaacatggagaaaccctatctctactaaaaaatacaaaattagtcaggtgtggtggtgcatgcctgtaatcccagctactcaggaagctgaggcaagagaatcacttgaacccgggaggcggaggttgcggtgagccaagatcgcaccattgcactccagcctgggcaaaaagagtgaaactccgtctcaagaaaacaaaacaaaataaaaacatcagccaactgtgggcattttccttcacagataactgcgacctccacttcaaggtggcccgagatcggagtagtggctatccgctcacaattgagggctttgcatacctgtggtcaggagcccgtgccagctatggggtcagaaggggccgtgtatgcttcgagatgaaggtgagtaggagcaagagaaggggaagggacagagaagtccatccattgtaatatcctgataccagccaccttggtcagagctgcaactgcaaaagagattggattgtgcaataccatgtccaagcagacaaaactgtgatgaactcaagacaactacatcattgctaaatatcatatcagaaaagcaggccaaccatgcattgcttcatcaagcagatatttccttggtgagatttgacccaggtattatgtagtcaaccagtgtagtgatgacatgtttgtagaactgagaaaagaagttgtttggaagaaaagtgatctagaaagaatagactcagatgtcacttattaaagggaggccagagggagaacagggcaaagaactgccagcttaggccagcctctgctgtcatctctccacagttccatgtcaagttatgtttatgaaaataatagatgctcatgtttaacaaaagttcagacagcacagaaaagtacaggataaaacaggttattctcgccaggtgtggtggcttttgcctgtaatcccagcacttttgggaggccaaggcaggtggatcacaaggtcaggagttcaataccaaactggccaagatggtgaaaccctgtctactaaaaatacaaaaaaattagccgggcatggtggcgggtgcctgcaatcctagctattcaggaggctgaggcagagaattgcttgaacccaagaggcagaggttgcagtgagccgagatcacgccactgcactccagcctgggtgacagagtgagactctgtctcaaaaaaaaaaaacaaaaaaacaaaaacaaaaaaaacaaaacaggttattctcatgtcctctcagttcccatcctaccatcctactccctggagggaacttctgtgttaacaatttcttacctgtggtttgtgtatccaaacttactgatgatagctaataagtatagagctctttgcatgcacaagatacagcaccaagctctttacatggattatctccattaatcctcacagtaccatctggaaacaggtactgttagccccagtttttagaggtagaagctgaaacacagagggttatattttattgaccacgacaccattgatgtaagttgtgcattattttatgtacctctcatagagaaacactgcaacaaaataaactacgcagtgttttctttttttgtttgtttgtttttttgtttttgagatggagtttcactcttgttgtccaggctggagtgcagtggcgcgatctcggctcactgcaacctctgcctcccgggttcaagcaattatcctgcctcagcctccccagtagctgggattacaggcatgtgccaccctgcccggctaatttttgtatttttagtagagatggggtttctccatgttgatcaggctgggcttgaactcctgagctcaggtgatctgcctgccttggcctcccaaagtgctgggattacaggcgtgagctgccgcacccagcatacgcagtgctttctcatcacatttattgtaaaatggatcctgatttcagagattttaaaatgtgtgtctgaaaagccagtgaggccacaggtagatacggatattcggcagtctagtcttttaatacgaaattaagtcagaaggctttttttttttttttaacttaatactgtatcttggacatttttccatagcagtacattagcccaatgtactgctttgctccttgttttttgtttgtttgattgtttgttttgtttgttttgttttgttgacggagtttcacttgttacccaagctagaatacagtggcgcaatctctgcttactgcaacgtctccctcctgggttcaagcgattctcctgcctcagcctcccaagtagctgggattacaggtgcatgacgccacgcatgcctaattttttgtatttttagtagagacggggtttcatgatgttggccaggctggtctcgaactcctgacctcaggtgatccacccaccttggcctcccaaagtgctgggattacaggcttgagccaccgtgcccggcctactttgctctttttaactgttgcatcatattttgtggcatggatataccataatcagtgctttattgatattttttctgatgttaaaatatatatatatatatatatgtgcacatatatacatccaatgctgcacagaatgttgcatatacaaatacagtcacacatacgtagacatacttgtccacatattagtgtatctataggatgctgagttatagagcatgtgcatttatggggttttgttgtttttttcttttaatgtttttgtaaagatggggtcttgctatgttggccaggctggttcctaactcctggcctcaagccatcctcctgccttggcctcccaaagtgttgggattacaggtgtgagtcaccatccccagccatttacagttttgatagagacttctagattgccctctaaagacactgtaacagtttatctttctactagatgttacaagagtctcttaaactaaaacataaccgtattttgaaatgcctgtctctgtggccctgtactctactgatccctttggaggccctggcttcgattcggttcaacaggcttttcagagctgcttaaacgcttcttctccagcaagaaaagccattgctattttttaatgcctgatatgcttccctcctatattggctcataacctacggcctccagagaagcaaccctgagcccttttgtcctctttcctcagatcaatgaggaaatctccgtgaagcaccttccgtctacagagcctgacccccacgtggtccgtatcggctggtccctggactcctgcagcacccagctaggtaaggaggggtcagctatgcagtccagagaatagagtgactgtccctacccttggattttcaaggctcctaagcttccttttccagcgtcagacttagaatagaactaggctgaagtggaacaggtacaaggattaggtatatgccactgtctctgtcatgctgtattcaactgagaggactatggtcatgaaacaacttttctgtgaagaatcaattcttatccttcatcttttaggagagggtccaaaattctctttaggaatctattccctttctgtaaaaaggatcagtgtctcctgcccttaaaccaagctgctgataagttcccaagctccattaagttctgtctgtattttctgtccggagcctaacctagaggaaaaaggggagcagagaccagtgaggccagggctagttgggagaggggcaggggctgcctattgaaaggttttgaattttgcgggtccccaggcttcaatgaccttctggtcccaagtgactgattattctgaccaatgctgacacctcctgccttccgtttatgatcatacaaacgttccaattatgaaaataatatgtgttgcgtataagaattcaggccatacagaaagggaaaaatgaaaatccttcctaaacctgtgagagaaactaaccaatgttaacattccatttgtagtcttctggacatttatttttttgtacatctttaaactggatcacactaggactactttgtatagccttgttttaatgtatgatgggcatatttttgtaaataactgcagctttttgactactgcataattttccattttatagttgcattatttaacaagtccccttctgtagctcatttaaacttattgcaaatttttgctgttttaacacttgagccattatcctggtccataattgcctgaccacttaagactaatctttaaaaatagatgatattctcactcacaagtgtttgtttaaaaaatatgttcacatggacttagagagtggaataatagataatggagactcagaagtgttagggggtaacaaggtggaggaggatgagaaattggttaatgggtacgatgtacattttttaggtgatgaacaccctaaaagcttgaccactatgcaatctgtgcatgtaacagaattgcacatgtaccccataaattggtacctcctcaaaaaggtagatatgttagcaccaaaaaaaaaaagtatacagttttcatttccatatgtgttagcactttttatttaagactcataagtcatctcatcttatctctgtctccgttttgagatgtaggtggtggcagttgatagggatggggaaacagcccaggaggtcaagcaccatatccagggtcacatagctggtttgtagcagaacgagccctggcattcatgcttgtcggcccctgcttttctaacagcatactctttgggttctgcccggaatctctaactcaggtgtcagccagagcccttgggatctctcagtcatatcacttcagcacccagttctgtagcctgaggaaatctagtacctttcccaggggtcagtcctcatggtctccaggagcaaaatccagccccttcactgatttctaccacaagtagactggactgaatattgggtgtcacaaggaagggttgcatctcagcatacagccattctcctccatcccaactcctgtcttccttcctccctttcttttcaaattctcccctctgtgcagagttattcagttgagctcctactcccagactggacaatgaaacccatcaagccctccaagttctacatcattaagggcttcctttcacccttccccacccctattttaaaaaggcatctgattaataaaactagtaaagaaaatgatttttttcttcaaaaataaaagtatgtggcagccattgaggctgttatgaccatcgcaggtttaacctgcctttgcctatttcttccgtcaggcgaagagcctttctcctatggctatggaggcactgggaagaagtccaccaatagccggtttgaaaactacggagacaagtttgcagagaacgatgtgattggctgctttgcggtgagtgctagcagcctgtgggagttggcagaaccagatgttgggctacagacttctttttcaggatacctctatccattgtctgccccatatccagccactctcgccatacttctttgtctctgcttgacagactggaatgtttactgtcattttgtgggaaattctgtcattccatctcctctggtcttgtgtgcaaagttttcagatgacaccctgaagaggtttggggacttcaggtgtgcatagccttcctccgttcctaggtaccagagtaacattttctaaacaaacctaggaatttcttatctttcattgctaggaaatagcctgtctgctcctgaaggcagtggtattggctcttgccccatgttggcatcatcttatcccaaaacttctccctttcttcatctcacattggttgagccaggcttcctacaatgcactgccttctggaagagtagagatgatgcaaaacagaacagctgttgctgccatacttcagtctttgagaacagtgaccagcagtcaccttgctgtgcagtatggctgtcagctctgggctggactccctggacccagttatgttcttccattcaagccctgggcaatttacccttcttgtttttcagttccctctaaatgagaatctttgcacctacctcagaattttgtgtggagtcattaagttaatccattaaaagcacttataataatgcctgacacacagtaagtgctcagtaaataccacttaatactgttaacattaggagttataagagatgtttgtaaaatgtgccgtaaggccccagaggaagtgaccacctggatggattcatcctctgaagcttattcttttgccttccttcatatttgtacacatgtactcttccttcttcttttttatttatttatttatttttgagatgagttttttgctcttgttgcccaggctggagagcaatggtgcgatctcggctcaccacaatctccgcctcctgggttcaagcgattctcctgcctcagccccctgagtagctgggattgcaggcatgcaccactacacccaactaattttgtatttttagtagagacggggtttctccatgttggtcaggctggtctcgaactcccgacctcagatgatctgctcgcctcggccttgcaaagtactgggattacaggtgtgaaccaccacgcctggccccttcttctttttttaactttgagataaattcaaactcggaaaagcttgagaataaagaattctcacagggccttatccagattctaacatttgccacatttgctttaccattttcatgtttatggtgtacatacacatagagagttaactcttcaacaatgtgtttgaattgcactggttcacttatgtgcatatttttttctttttttctttttttttttttttgagacggagtctcgctctgtcgcccaggctggagtgcagtggcgggatctcggctcactgcaagctccgcctcccgggttcacgccattctcctgcctcagcctcccaagtagctgggactacaggcgcccgccactacgcccggctaattttttgtattttttttttagtagagacggggtttcaccgttttagccgggatggtctcgatctcctgacctcgtgatccgcccgcctcggcctcccaaagtgctgggattacaggcgtgagccaccgcgcccggccatttttttcaataaatatattggaaacttctttggagatttgcaacaatttgaaacaacagacatagcctagaaatatcggtaagattaagaaaaagttaagcatgtcatgaatgcataaaatataagtaggtactagtctgtttcatcatttactagcataaaatatccacaaatctattacaaaaagttaaaacttatcaaaacttgtgcacacagactctacatggtaccattcacagttgagagaaatgtaaacaaacagtacagtattaaatcataactgtttttattttatttttttgaagacagattattttctctgtcacccaggctggagtctcgtggcgcgatctcaactcactgcaacctccgcctccggggttcaagtgattcttgtgcctcagccacccgaatagctgggattacaggtgtgcaccaccacgcctggctaattattgttttttgtttgttttgttttgagacggagtcttactttgttgcctaggctggagcacggtggcgcaatctcggctcactgcaacctccgcttcctgggttcaagtgattctcctgcctcagcctcctgagtagctgggattacaggtgcacgccaccatgcctggctaatttttgtatttttagtagagttggggtttcgccgtgttggctaggctggtcttgaactcctgaccttaggtgatccacctgcctcggcctcccaaagtgctgggattaccaagtgtgagccactgcacctggcctaatttttgtatttttagtagagatggggtttcaccgtgttggccaagctggtcttgaactcctaacttcaagtgatctgcccacctcggcctgcgaaagtcctgggattacaggtgtgagccaccaagcccagccaactgcataaaattaaccagcgcatactgtaataattttgaagccacctcctattgctattatggtgagctcaattgttgcaagtttctacttaaaacactgtgtgtcatacatcttcacgtgagcagttcttttcggtaaattgtgtatcacagtaaaaagtgatctcgcaattcttgtgtattttttaatcatgttactgcaatatcataagccttgagtagcaccatgggatccatacgaagttccactagtgatgctggaagtgttgctcagaagcagaaaaaagttatggtattacaagaaaaatttgaattggttgatatgcactatagattgaggtctgcagctgtagttgcctgccatttcaagattaatccagcataaggaccactgtaaacgaaaaaaagaaaaaattcccgaagccatcactactgctgtgctagcaggtgctaaatccctgcactttttatcatatattgacaatgcaaggccggacactgtgactcacacttgtagtctcagcactttgggaggccaaggtgggcagatcgcttgagcccaggagttcaagaccagcttgggcatcatggtgaaaacaaacttttaatattttataaacataaaaattaactgggttggtgatgcacgcctgtagtcccagataggaggctgaggatcgcttgagcccaggaggctgcagtgggttatgattggcccactgcactccagcctggatgacagaatgagactctgtctcaaaataaataaataaaactgcagcttttgtgtaggtacagagttgctataagaaaggcatacctgccgggcacggtggctcacgcctgtaatcccagcactttgggcggccaaggagggcagatcacgaggtcaggagatcaagaccatcctggctaacacagtgaaaccccgtctctactaaaaatacaaaaattagccgggcgtggtggccagcgcctgtagtcccagctactcgggaggctgaggcaggagaatggcgtgaccctgggaggcggagcttgcagtgagccacgattgcgccactgtactcccgcctgggtaacagagcaagactctgtctcaaaaaaaaaaaaaaaaaagggcatacctataggctataattcaagaaaaagtgaagtcattatatatgacaacataaagcaaaagaaaggggaaagatctaaagctgctgaatttaatgccagcaaaggatggtttaataactttagaaagaggtttggcttaaaaattctttacaggaaaggcagcttctgccaacgaagaggcaacaaacaagttcccaggcatcattaaggtataattgaagagaagggatatctgcctgaacagatttttaatgccaagtgcagtggtatgatctcagctcactgcagcccccgcctccccggttcaagctattctacctcagcgacccaagtacctgggattacatacttgcgccaccacacctagctaataatttgtattttttgtagagatggggtttcgccaaactcctgagctcaagcaatccgccctccttgacctcccaaagttctgggattataggccggagacaccatgcccagcaaattctgtcagattgatgatcaggactgttacttataaagctggtaactctcaaaccctaaatcctcaacaccagttgccagtcatttggttgtacaacaagaaggtgtggatgatgaaaatcctttttctagattggttccattgatgctttgtttctgaagttaggaaatacctttccaatatgtggttcccttttaaaattattttgatattggagaatgccaccaagaaccccatgagtttagtacagaaggggtcaaagtggtttatttgtccctaaacaatgggctgacccttgaactttgcagggattaggggcaccaacccccatgcggtcaaaaatccacgtatagtttttgactcccaaaaacttaactactggctgagcgcagtggctcacgcctgtaatcccagcacttcgggaggccaagctgggtggatcacttgagcccagaagttcaagaccagcctgggcaacataaggaaaccctgtctttaccaaaaatagaaataaaaattagctgggcctggtggcacacgcctgtggtcccagctactcaggagactgaggtgagaaaaaaaaaaaattaatagcctactgataacataaacagtcaattaacacataggctagtgtctacaatttttatgcactcatatgacatacctaacttttcctttttttttttttcagtatttctagtcatagggatctgagagttttttcaaattgttgcaagtgtccacaaatattttcagtatattgaatgaaaaaagtacacatgtaagtggacctgcccagcttgaagccagtgttgctaaaggtcagctgtgttttcatctgacccatttgagaggaggttgcatacatcatgtcttcattactttggtctgtattccttcttttctttttttttaataaatgagacagggtcttgctgcattttcacaggcggtgatccctcttctgatcagcatgagagttttgacttgctttgtttcctaccttggctagttcacccctccttaggcaacctgatggtccctaactcccaggaggtcaccatatcaatgccgaacttagtgtggacagccgattggcatagtgcactacagcccagaactgggctcaagccatccaccccaacctagtagctgagactgcaggtgcacggcactgtgccaggctcggtgtgtactctttttttttttttttttttttttttttgagagaagtctcactcttgtcccccaggtttgagtgcaatggctttatctcggctcactgcaacctccgcctccccgggttcaaacgattttcctgcctctgcctcccaagtagctgggattaaggcgcctgccaccatgcctggctcatttttgtattttttagtagagacggggtttcaccatgttggccaggctggtctcgaactcctgacctcagatgatccgcccgcctcagcctcccaaagtgctgggattatagatgtgagccaccgcgcccagtcggtgtgtaccctttttgagacggagtcttgttctgtcgcccaggctggagtgcagtggcgtgatctcggctcactgcaagttctgcctcccaggttcaagtgatttttttgcctcagcctctcaagtagctgggatcacaggtgcacaccacgacatctagctaatttttgtatttttagtagagacagggtttcaccatgttggtcaggctagcctcaaactcctgacttcgtgatccgcccacctcggcctcccagagtgctaggattacaggtgtgagccaccacaactggctgattcttaagagtaaagatattaatgacagtaaagttattaaatttaaaacttgatataatgctattatctactgcgcattcaaattttgtcacttgtcccaacaatattctttcgtccagttgagtttctagttcaggatctgatctggcctgggatcatattgcattctcttgccatgtgtctttagtttcctttagcctgaaacagtttctcagcctttttttgcatttcaggatctcagtatctttttgtttttgtttttgagacagagtttcgctctgtcacccaatctggagtgcagtggcgcaatctcagctcaccacaacctccacctcccaggttcaaacgattctccagcctcagccgcccgagtagctgggactacaggtacgcgccaccacacctggctaatttttgtatttttagtagagtcggggtttcaccatgttggccaggctagtctcgaactcctgacctcaggtgatccacctgcctcagcctcccaaagtgctgggattacaggtgtcagccactgcgcccggccctcaatatgttttcaataaaacatttttaaaatgaaaactgtgttcatactctacaaattgttcggttttaaaccttgcatttttttcccattgaagagtaaatcttggccatctttccctgtccacacagacaatatatagatctagctcagttaaagttgtttcttaatagttaatcattgtgaattgattttttcaagaatagggtttccaaaaaaaaatcgaggaatgtaaaaggggatacagtgtaaagtcttctttagacaccccccctcccgccccacccatttttcacatataccctccccagcatgtgaacccactggtactcggggtttcatctttttttttttttttttaacttgtatgtcttgggggtctttttatttatttaatttttttgagacagagttttgctcttgttgcccaggctggagtgcaatggcatgatcttggctcaccacaacctccgcctcccagattcaagtgattcttctgcctcagcctcccaagtgctgggattacaggcatgcgccagcatgcccggctaattttgtagttttagtagagacagggtttcaccatgttggtcaggctggtctcgaactcccgacctcaggtgatctgccctccttggcctcccaaagtgctgagattacaagcgtgagccaccatgcccggccttggtggggatctttttatggtactaccaagagagcttctttgtacttttatattgtctgtagtcattgtatgactgtaccataattgatttaacctagcgcctccctttggtggacatgtcgttacttttgcagctttgtatttagtgactgtaatggctgtctagtattctgatgcaggggtttgggtaccctgctttaatttagcccgtcttcctgttagtggctgtgaaagttgtttcctggaacagataaatgcggcttgtcttttttccatttactggagtaacttggagatctttttgtagccccacatatggatctcctgtgcaatttagccactcctacttccccattggagcacattttccgtgctggcatgagcattttgcacatagaattttgcattcttgtgggaatgtagttgtattccttcttgaaagttagattctaagtcaaaggtatatttttaaattttcatagctaccaccaagactacactccaaacaggttgcagtaatttaacttgtcactgtgtgacagtgtttgccaaagtctgttctttcagagtatgaggttcttttggtatgtggcagtatggaactctaggccttgactcttgcttcaaccagaacatctctgcatccagtcttaagattccttatatagttttctttgttcagaagataccacaactttaaaaaggctcagggtgaggagttggtgggggtgtaaaaatcattggtctcctggaacaagaggggaggacattggtgtcaaatatcaagtcctcaatttgcaaaacaaaaaggtaaaacagccttccaagtggagaacagaataacccatttcagcaaaccataaagagtatgatacttagagcctagggacaacagaaagaggtgtgagacaccaggctataaaaatggcaggctctgaattatgccaggcttcaggagtttgggtctttaggcctgggactgacacaggagtgtttcagcaggaacaacaacacaactccacttgccttttggacagatggctctgttggtggtagatgggttggttgagggcgccggtttctgtgcattatgggaagttcctatagtgaagctggtggccataaggaaggctaactaacaccaacagtcatacctgctctccatggtcttttttttttttttttttttgagaaggagtcttgctgttgcccggctggagtgctgtgacatgatctcggctcactgcaacctccaactccctagttcaagtgattctcctgcctcagcctcctgagtagctgggattacaggcactcgccaccatgaccagctaatttttgtatgtttagtagagacggagtttcaccatgttggccaagatggtcttgatctcttgacctcatgatctgcccacctcggcctcccaaaatgctgggattacaggcgtgaaccaccacatccagccgctctccatggtcttgacgtgggtgcatgcttagagatgaacaggcatgagggcctctgacacagagctgtgccctgtgagcactgaggaggttaatgaggaagctcctcaagggagggtgcttctgtcgcttcttgaagggcaattcccaaggtggtcacctgaatagagaaagaaattatactttcatatcagaaagcgaaccgtgtattttgcttcagtctgctatctaatctcaagttttgagccttttcttctctgagatgggcatttagaaaaatatttaacaaacgttttaaaaatataaattttaaaaaggcaaaaaaacactaagaaaaaaaagagcctctcgtatcctgcagccaaagcaatgtttccaaaacacagttttgagcaggctgctcctctattcaaaataagtcagacactctgctctgccaccagcatcaagttcaaattcctgcggtaaattagagtccctcacatgccgaggtaggccgtgtcccctcccaccacttcagtcccagccccttatttctagcacagtgcctgacattttgcagtgatagctcacattccttgtgtgctcactgtgtattaaatgtactagcccatttaacagttagaataaacataggctgtataaaatattattaccccgcccccctttttttgataaagaaacaagatgaaataacttaaccaaggccacaagttagtaaatggtagaactgaagccatccaccttctaaaatgggatcataggctaggcgtagtggctcacacctgtaatcccagcactttgggaggctgaggcgggtggatcacctgaggtcaggagttcgagaccagcctgaccaacatggagaaaccccgtctactaaaaatacaaaattagccgggcgtggtggcacatgcctgtaatcccagctaattgaggcaggagaatcgcttgaacccaggaggcggaggttgtggtgggccgagattgcgccattgcactccagcctgggcaacaagagtgaaattccgtctcaacaaaaagaggggggatcttaattactaactttagcaattcaataagtagttgttacagaataaatgaatgtggtccctgcatggctcttcagctgttcctgaattacttccccctcatcttttatgcctcagccaatctgaccttgtgttctgtcactgctaggcttatatacaagcaactgagaaacctcagaaacttgcttctaggtaggtcatcttactgaattatgatagagtgtccttgtctcattccccactggtcgctaagctctgtcggtcccagattatgcagacatgtgtatcagaaagagtacgaactcagggaacatgttgaacaagctgaactcagttcgaaaaggccctgcggtggctttccttcatctgttatattcatagactgccctttctgggtttcttttgtttgtttttgtagagatggggtctctttctgttacccaggctgtacttgaactcctggcctcaagcatcctcctgccttggctgctcaaagtgatgggattataggcgtgagccactgcacctgtctcctcatcagttttcaggacaggactggaccaccttttccttcgtcttcatctcagtctaggcacaagactcaaatacttggagcttcttaaaattacctgctttaggacaggtgcagtggctcaagcctataattccaacagtttggcaggccaaggtgggaagatcacttgagtccaggatttcaagaccagcctgggcaacataacaagaccctgtctctacaaaaaaatttaaaaattagccaggtgtggaacatgcctgtagtcccagctactcaggaggctgaggtgggaggattgcttgaacctggaagtttgaggttgcggtgagccctagctgtgccactgcactcagcctgggggacagggtgagaccctgtctcaaaaaaaaaaaaaacaaaaaaaaaaaactcttgcttacttgcttcatatccaccaactttggggtcttaggcaaggaggactttgggctggacattctctgagatgttcactgatgctgcccagcttacctgtatgttggggaaggatgcacttcaatctggaaagctgtccacattctactccctgcatctactgtcctcacatttgactcccagtgcctatggcaagagttggcaatcatattcctttggctttttctcctaggattttgaatgtggaaatgacgtggaactgtcttttaccaagaatggaaagtggatgggcattgctttccgaatccagaaggaagccttggggggtcaggccctctatcctcatgtcctggtgaagaattgcgcagtggagttcaacttcggacagagagcagagccctactgttctgtcctcccggggtttaccttcatccagcaccttccccttagtgagcgtatccggggcaccgttggaccaaagagcaaggcagaatgtgaggtgagtggggccagaatgtattggtggccaccttgctgccaagacagaggagacacacacacacacacacacacagacttgctgcgagagtagccttggggcaagtggccactttgtcccagctcctcagggttggactcagagctgaaaagctgctctgagtgtgaggtgaggggtgttggtgtgacctaagttgaagtcggagaggctacctaaatctcagaaagattgcatcttcttcttaagtgaggccagaataggggaaaaggaggcttttcttacagcagaaaaggacactaggcgcttcttggggagtgcactgtgccaccaagtgttctttttttttctttagagacagggtctcgctctgtcacccaggctggagtgcagtggtgcgatcacggcttactgcagccttgaccttccaggctcaagtgatcctcccacctcagcttctcgagtagctgggaccacaggtacatgccaccatgccaggctaacttttttagccactgagcctggcccaccgagtgttcttgaaggaggttgagtaagttccacctctcacccagagctatcaaaagataaatggcctttgggaagatttgattccaagagctatactagtgtcttttttcttaaaacaatatttttcttgtatgtgtaagttatttatgcttgttctagaaaattaagaagtaaaaaatttaaattttcataatgccatcatctacaaataagtttacttgcagagttttggagttcatctgttctttttaatgtctaagtgcctgttttatgctcacaaacatttatcattgagattctatggtataagcattatgataccctgctcttttcacttcacattattttgtgagctttatcccatcacataaaaacctctctttgaacatcattttttcttttttaaaaatccttcaagggaatgaacgtcattcttaatggccttacaaactcgccactcccccctagtcgggcatttaagatgcatctgtgtttaccaaattctaaatgtactgattagatacaattcatgtccttgtgtgtgcagctctgttcctatttcatacttaaagaaagttgtaccacttctacccactccatggggccagtcccagtacacagccttccctgggctattgcagggggcggggaatgggtcacataatcctgtaaatgggctgggtttggtggcaaatgcctataattccagcactttgggaggccaagaagggaggaggatcccttgagtataggagtttgagaccagtctgggcaacataaggagactctcatttctaccaaaaaaagagagaaaaagattagctgggtgtgatggtttgtatctgtagttctagctactctggaggctgatgtagaaggattgcttgagcctgggagttcaaggctgcagtgagctgtaattgggccattacacgccagcctgggcaatagagtgagaccctgtctcaaaaaaacaaaatactataaatgctaatgatgacagcacttggttttttgtttttgttttcccccgaaagtcctgggattataggcgtgagctaccgtgcctggccagcacttgacttaatgctcaccctgtcccaggcactgtgctcagagtctgacaagcctgatctttttgaatcccgataccagtactgtgaggtagatggtattactgcttccgctttgtagaggcagccacagctcagaggtccagagtcacactcacagtcaccaccgagccaagtggtgccataccaccatgccgcaacaccttccctgtcttgttcttgtagattctgatgatggtgggcctgcctgctgctggcaagaccacatgggccatcaaacatgcagcctccaacccttccaagaagtacaacatcctgggtaccaatgccatcatggataagatgcgggtaaggccagccactggactctccttactcacctccaacctactgagtgctgccctgcaactaaaatcactcacccctcaccaattcctgcccgcaggtgatgggcctacgccggcagcggaactatgctggccgctgggatgtcctgatccagcaggccacccagtgcctcaaccgcctcatccagattgctgcccgcaagaaacgcaactatatcctagatcaggtacttaatgatgaccattgtgtcctcaggagaagggaggggaccccttgcatgcctgagaatctccctctggtccctttcttttttcccccgtaatgatgatggactgctgtgctagtcgggggggtcagaccttgtcatacatgatgacatggtactacacacagctgagcctggactgggatcatgatctaggcctacttactcagactcatcagcagccccaaagaacatcaggtaagaactgtttagcaaaatggaaggagtatggatttccaagcctgagagactggagcttgaatgccagctcggctactccctagctctgtgcctttgggcagctgactttattctctgaatctccatctcttggtttgtaaaacagggatctcaataccatctgcacccctaacgcaggacctggcacttagtagctggtgattattgttaaatactctacagaataggtagagtagctttcatgccaacagcagtgctgtaaggtaaatgctattattgcttccgtcattttctcttcacaaatacgtatgactggcaggtacatacctaagtcatattttctacctacacttcagttaatggtggagttcttaacatcagggaccttggaacctttgtatttgaacataaatattgtatgcagctgcaggtgtatcctttttatgaaaaagaagggaaaaaaaaacagttttttgtccctatctttcagcattctcaaaaggatgagtgacccaaaaatcattacagattcctgtctcagagtaatgagttccacatggttattgcctatgcaacgtcattgcctattgacatttgtcctgaaggctttcacaagtaacaaagggtgtctccttattttctatgtttggggatctgtgaatgagcctctgttcccttcagccttgcatttgtgctttcttaagaacctgtgagtgagcaaatatgtaaactaagtaacaccctgcccttgtagccttcctgaagtgccttccatacgtgtaggcctggatacttggtgaccatgagttcaaagggctcctgataagagtggaggtggggacagcgtttggctttgtcagaatggtagtttgcttgttagaaaggaatcgccagagaccgagttgccttcacataggaatgaggatcctacacaaaacagttgagcacaggatagtctaaaagccatccgtggttatccccccagctcatattgtgtacaatcagtgttctctccgctttgaagatttgtcttttaaacccttggcctcactttacctgatcctccttgtcggggcattcaagaatttttttagtctgtattgaccccagttggactcattgtcgtgaaagggagagcagtaataccattttaacactctgaggatacatacctcttttggataccctagccagtattcctccctgtctttttcttggtttgctggttaaatcagctgtgaaactcatttcaaatatgtggcctaggggagaatgattatagtctagagtggatcgtctaacatctctgtccaggatgctgaagtgggttttctctggaagccaggcccatgacagctttgcactctgaagacctactgtcagccttcttggctgctgctggcttgttcagggacagggtctagggctgtaccaggtatgcctgtggtcttcagggctaccagcctcctgcttaagggacatgtgggtcaggccaagagatcttggccaacaatgagacagagaacctaaactctgaaggctggggaggagggttctctggttaaccacagattggaggattgcctcggggcctgaagccataggctactcaggctgagggagggattgtaaagccagtggtttcacctgttttggcctaaaccccaaaagtgggttccagaaaactctgggtatgagaaagagggagggggaagttgtgtgtttgtgtatagagggttcagagcaggcccctggccaatcctggcacttccattccaccagctttggcggtgacaggtaagttgatgatgcatagctgtctcctgggctaggtggaatttccaaaggggaaacccatactacaggcaaaatccctgcagttcctggatctcagcccagaaccatcttttgcctttactggtttttcctgagtggtcagatctccccagatttggctcttccagcctcctgttatgtaggttggccttagaaatgctcatccttgagagggaaggagaggttgtctgcagaagccaggtgggcctttgtaagccaggattctgtgtttgtctggccaggactctaactcctaccctgggatgtatgtgattgggcacaaactctcaggtatatcggggctttgacctacattctgtgataacctgagtagccttttgagatgatgtgggcatcacagctgtggaacatcagaagaggaaaaagaggtagaccagagaggaagctgaagcctctgcagaggactataggactgctaagtcacgcactcagtgtactgatagatcacagctctgctgacttcccaaacagccatagtctagaatggttggggccatggtgggaatttggggaagctttctggaggtggaatgtctgagtcggggcacagaggatgattaaaagagttggggctttgtcctgaggagagtggggagtcatggttaggttttcatccggaggaatgtggataaatttgcctggctagtaaaaggctgcagaggagagagaaaggtggagtagaaggccacattgcttcaggtgtctctttggggtcctctgttggaggtgggaagcctctggaatgagatgctttctggccttgtcccagagggcctcaaaatggagtacagaacaggaactgactggcctgctgtgaggcaaacaagttgcctttctggaggcttctggggagcctccgcagggccatgttgcccaagcccaccccagagtagggcactgttgcctgggagttccgttagagggctctaacagctagagccaggccaggcatcagttagaatcagggctggatgggttgacgtcacagtcagaacatgtcgttctagtcctcatttgcatcctggtcagcaggtgccacactttcgcctgaaacagaaacccagggctagaatagtctcccaccgtaacctgtgtcttatttgcaggccttggaggaaggatgtttctttccttcatccccagccagccatccctagagcctgaagcccattccattcttgacacaccagccagttctcttcctataaatgtggttcttttgactggaattcacctcactctgagcccaaagtaaatctttcctcatcagccttcactttgctcctcagatctagctaggtttctcctgctgccagtatgaccctggtgagctgtgacaagtgagagtagacagggacagtggggcttgagagatcctgggctgtcacatcatcattcgtacctgctgtgttccctcctccctccctcagactgttatacaccaaaactccccatatagcttctctgagaaacccaactcttgtcccttagtccatgtcacagggttcagggaacacagacagccacattttctcttggaatcaacatcttcaagcagggtgggactgggagaagcagaagctaggcagagggaaccaaagcagctggaaaagctgacctagctgttgtgctggtctcatagcaacagctgccagcagcccccagcgaccacagaagtgctgggctggcccaggggctgtgacctcactgtgtttgctgtggcaacagccaccagcagctaattccctttcctccaggaaagccaagtatttgcatttctgctggtgtggtttagatactcttcttcccttccccaaacgaaggagtaagtggagggaggtgcagtcttaaaaaccactgctgagttgattctcagcacctcaattccaaagtgcctgagaagccatctctgagtctacccacttccaaggacaaaggccagctatttataagtccaatctgctccacctccattcctctcatcccatgaagctgcaggggctagccgtcttggcagcattgcttctcttctctgtcccctcatcaggacattgacagggcagttgtaccacatggaagacctccaggactgtcactccatgccctcgcagttcagaggaatcaaagtaggatcacttaggggcaaaaaaaaaaaaatgcagaatggtctggggccatattcaccctggcacctacctactctgagcttttgtgtcagaagaaaattatatttagctgaggaagccaaactctttcttcctatgaccagatgccacgttctgctttggttttaggaatggagtcaaagaagagtagtggggagaggggacttaacttttcctctgtaacatgatgttccttttcaaaccatttgtggcccaagtgctctttgtgggccggtgtccaagaccccaagaacagtatgtgtgtgcctgtcacccacatgactgcccacatcctccttcgtgagggtagggacactttccctgggggacagggaagaacattttttcctggcgcgtgtttcagggccagaggatctggttagtttaagcaactgcacccacggccccagaacttccagcagatttgtgctggagtccttggcccctggctaatccacatccagcaccctgttcctatgtcttagaagacgatctcttgaaaccttgttttttcctcaagcttcaattttccttggtattttccattgggaagcctctcctggatagtcagtcctgtaggtcttattttcagatccactctgggtgttgacttttcactgcccactcctttggcactagccagagatttttacatctgcaaatgctctccagagccaggacgagggtgatgatccttgtctttcagacgaggaaatttgagactcaggctacttggggacttgtctgagtctcacaaatagtaaagggcacagcggggatttcaagcccaagtttcttccccaaagcctgtgttcattccaccctgtctcactgttcctgcttttctgcttgggaggtcactataagcttaaccttttctttggtctgagttgcttcaagtcaacatgacagtataaatatctacccagtgatgaccacatcaatggcagctcacagttgttgagtgttggctatgagccagggcctgggcttagacgagggcttttactcacgtggactcattcagtcctcacagcaaccctaagacatccatgccgttttcccttttcagggcttgattttacagaggagcaggctgaggctgggccatcccagtgcactgcccgcttcctgtcaaggtgtcttctgccctggaggccacctgtgtccccctacttgagtagtttcttgcactttgtcaattgctttatggacattctcttactcagtccttgccagcccagggagggaggcttttcaaccccgtattacagatgaggcaactataaggactggccaaggtatgttagtagccacaccaggacttgaccctagactctttgcacccaagcaggccacatcttcagaatacatttttttttttttggtccatttgtatatacccctttacagactgttttccccatctgtggcttctttcttgggtccctattagagccactaaaaaattgtttaaatgcagttaaaaactccttactccgtttctgctgagttcctgagtttccatagggagggtacctgtataggtgcctgggtcttacttctagaggttcaggctcaggaagtctcaaatgaagtttgagctgctcactttttaagtagtgtcctcgtgattcaagtatacaggctgagtctatggaaccctgaatccaacagaggtaggccccattcccaaagggcccgacatgaaggaggtgttcggtaaatggaagccgatgttgttactgctctcaaccacatatgtgctagagcaccgctctgccagcaccagcccaggacacacctgccatcacttagaggaagggaaggaaacattaggagcaaaactgcacttgcgaaaagcagagtctcctgatgtgtagagcttgctggttagaagcttgtgggtgaggctgatgtttcagagaaggactgagggaataaaagaaccaatgttaataagaacaaactacaaaactgtccaaaggagctggttaattagtagcatagctaatctataggtattacacagccattaaaaaagaatactgcacagaaaaacttcagagaaagtttcacgttacatgaaaaagcctcaggaggatgtgcataatacaattctttttgtgtaaaaaaatcacatagatatttctaaaagtgcacggaagaaattcattcttcattctctctgggaagtagggctggcactaagggaacacaggggtttttcctctaaactttatgccttatactgtgaatttttttaccaagagtatgtattagcttttagaatagggaaaagaaattgtaaggtccagtaccaagaacaaataggattaaaaagcaaagtcccaaccattaggaatcctttgccctgtgcctgtctgcagccacttacctaagtcaattcatttgctgagggtgactcaagaatcttctaagtaaagaagagctgtttcctgagtttctctgcttacaaggagcactgatatccttttctcagtccctggcctacataatacccctcagaggaaaaaaccaactcttaatgtaccatctcttgcctcttctgttaccttacccttagacaaatgtttatgggtcagcccagagacgaaaaatgagaccatttgaaggcttccagcgcaaagctattgtaatttgtcccactgacgaggacctaaaagaccgaacaataaagcgaaccgacgaggaagggaaggatgtcccagatcatgcggtcttagaaatgaaaggtaggaaatgagtgcttcccagaggaacgtcaatgcagggtcctggagagaagaagctctttactcagtttgtccttccctggctccccagtgatttcttttttgatcttactctttctttgcttctgctttgtcccttccttgtctaccacagctgtgaatggaaaagctacccatctgtcttatgttggggttttcaggctggatggggctggggcagcacaagggaaaggatgtatgggagctaaagctgaaagtcctgtgtgctcaccctgcctctggtcccagatgggctgactgtgggcaggcctcagtttgtttctctgtaaatatagggatggtgatgccatctgtctgacccattccctggggtgaggcctgagggagctgtgcactgtgtctaggtgggtcttagccacctcttcagaaaacggaggagtctttgttagcccctgacacttagcaggctgaggggttggggctttgtctacctctttctctctctctctgtttttttttttttttttttttggagagggagtcttgccctgtcacccaggctggagtatagtggtgcgatcttggctcaccgcaacctccgcctcctgagttcacccagttctcctgcctcagcctcccgagtagctgggactacaggtgtccaccaccatgcctggctaatttttgtatttttagtagagatggggttttgccatgttggccaggctggtcttgaactcctgacctcaggtgatccacccgcctcggcctcccaaagtgctgggattacaggcgtgagccaccgcgcccgcccttctgtctatgtctttcttattcactattccagttttcttcaccttctcccttctggaaggccactcttctgggtggaggggaccagacttcagaaggtactgacctcttcttcttgttctctttggggcacttccttcctcctagccaacttcacgttgccagatgttggggacttcctggatgaggttctgttcattgagctgcagcgggaggaagcggacaagctagtgaggcagtacaacgaggaaggccgcaaggctgggccaccccctgaaaagcgctttgacaaccgaggtggtggtggcttccggggccgcgggggtggtggtggcttccagcgctatgaaaaccgaggaccccctggaggcaaccgtggcggcttccagaaccgagggggaggcagcggtggaggaggcaactaccgaggaggtgagacatctcacacacagcactctccactttctgttcccaggttggggctgggctttgactgcttattcaatcagcaactgaagttttctgagctccagctgtgagttatactctggtagaaaacttgaaacaagtcagacacggagacctcagaaacgctcccactttcccactccctggacgctggttatgaagccctttgcccatttgcatatcacagtgcacattctgtcacattgctgtcatttttgtgaaccttcccccatctgaccatgagctccttggaaataggatctagatcaaaatctattggaaatgggggctacatctttggccaggtctgaagaggactagatgtgactcgttcatggctgtcaccagtgcttagcttcctctcattttttttttttttttttttgagacggagttttgctcttgttgcccaggctagagtgcaatggtgtaatctcggctcactgcaacctctgcctcccggcattcaagcgattctctcgcctcagtctcctgagtagctgggattgtaggcaagcaccaccacgcccggctaattttgtatttttagtagagatggggtttctccatgttggtcaggctggtcttgaactcctgacctcacgtggtccacccgccttagcctcccagagtgctaggattacagatgtgagccaccgcaccctgccagcttcctctccttgagcatctccttcctgcatattcaacagctattgagatgctgggacacagaaacccaggactgccttggtctctgcctcaccattcttgcagtccagtgaatgagacaaacctgtcataagggctgggacaggggagtatgcccgggggtctagagaatcccagaggacatgctttgttgttcaccttgagttcttgctctgcgcctggccatgccggctcacagtagtcaccaagacaacccagttccctggggttgccatttgggaatgatggcgcctttcatctggatttctccaacacaggtttcaaccgcagcggaggtggtggctatagccagaaccgctggggtaacaacaaccgggataacaacaactccaacaacagaggcagctacaaccgggctccccagcaacagccgccaccacagcagcctccgccaccacagccaccaccccagcagccaccgccaccacccagctacagccctgctcggaaccccccaggggccagcacctacaataagaacagcaacatccctggctcaagcgccaataccagcacccccaccgtcagcagctacagccctccacaggtgagagaatgagtgtgtgtttgtatgtagtgatcgcacgtgtgcttttgaacctgagcaagttaggtggaggcggatctggggaaatcaacacatgccccagctactggtcttcactctaacctctagcctgcccttctttctccctggccgtgatcttgactcagatggaccctacacattcccagatcccctccaaacccaggagtaaatgtagaccttcccagaacctgctcttctcccaccaccctcaaggggatgggctgtaagcactgatccctccagcaagtacattattcttggctagtgtcactaacctcactaaatccccaagaaagcacttgactggagtcaccccttgcccaggctggctgacctctttgtcttttggacataataaccagggcactaaggttgctgaggacttgccctctgcacagagagcttcaatcctgagcagctccaggctcagttcccattcttggaaagccagtgccctggctctggtatgcacaggctcctgtaaaccagagaggttttcagttatcgcacagccatttcccaagcactttcctcatgccgggcctggaatcagctgccaggagaccaatggatggttcccaggcccagctaactagaatatttcttagaacaagagttgggcaggcacagatccaaacccccagccccacaacatcctgtttctgtgagcttggacaaatagcttcccgtctctgggcctcattttcctcataaaggtgttagtagaagtcccttccaaggtttgttgtgaggaatgggtggcactatagctctgggactaggcagacctggggtcaagtcctttttccttggcccagaaatttcatcttgagcctcagtttctttctctttaaaatggggctagtgggacctacccctaggttctatatggagattatatgatgtaatgatccaacctgtacttgggaagcacttagtcaattgccactactgtttctcagcagatcttccagtaacaactaccaccacctgttgagtacccagtggtttatacacacaagcttattggatacccagggcaagctaaaggagttgttcttgttctattgtgattctcattttataaaaaagaaaactgagatttcaagaagtgccgtgtaccttgctccctgggggtctcagagctggggttagagtccacatcacagccctggggcttgcccttcatcctgccctaccatggcatggagctggctctcctccttctcagcccacaaacaatgtccactaggcaagggaagggcccctgtgggccaaccacttaaaaaggccctttttccatcccagcatttcacatctgcagatttcctctatttcacagagctttggcttttttccctccactttccagccgagttacagccagccaccctacaaccagggaggttacagccagggctacacagccccaccgcctccacctccaccaccacctgcctacaactatgggagctacggcggttacaacccggccccctataccccaccgccaccccccactgcacagacctaccctcagcccagctataaccagtatcagcaggtaggtgccagactgggggccaactggatggagagacttccatgggcccctcctgggtgtgtattcccagacttaagtccctgcttatccctaaaaagacagcctgctggcctcggcctggcgttcatctggtgcagccattccatttggtcaacacttctgcactggttgctaggtaattggtatcctagccccctccacagtctagcaagtgaaggggaagggctggcctaagtaccaggggcctcagagtcctctttcagcaccatagacagggggctccaaatcctgctgcaggttggtgcccaggcccccatacctgttactaaatcttttgactatgatatctagctatacccaaaaggcactgggttgacaagctgagacctgggcttcagtccctaactgcctacctgtgtggtgtcaggtctttccaaggtgccttgatttctctgtcaggggacctgtgttcaactgttgtcactgcagctgtctctgccctaggtgagggtggggctggtggggaggctaaatgtgtggtggatgcaggacaacttggtgttcttggtttctttccccagtatgcccagcagtggaaccagtactatcagaaccagggccagtggccgccatactacgggaactacgactacgggagctactccgggaacacacagggtggcacaagtacacagtagccagtgtgacccagaggctcccggaggcccctgccggcttcctccaccagcgcctgcctcggcccctcctctgcccccgccagatcccgtggtgctggggatggggtcatcccagggctgcctccctccagcccactgcctcccctctgaggggcttccttcccctccatagggccaggcatttttttctggattcaaacaggcaacaatgaccttttattttctgtttgtccccacctccccagccttccacctcctgttcttcctaccttcttcctttttgactaaataatccccacctcccttgatcatacagtgaggctacagtgactgaggggagaatcccctcctgttcactctcccaaccctgctccagcccctcagcttcccagaccctcatgcagttggttgtaaattctcccaggagctgttttactgtctacttttcaggattaaaaaaaaaatcaaaacttaaaaaaaaaaaagtttaaaaagcaaaatggggagggggaggaagcagtgacttttttttggtaattatgcgcttttttttaatttttagaatttgtctttttactgtgggtgggctgttgatatttcatcaagataagcatttctttcctgagttcaggtgactgaggaagagccacaaaacaaaacacaacaaaaccaaaccacagaatcatctttaacccaactttttatacgatgccccagttccccataactttgcacacaagcttctgtgttcagttgaattgtaactgctttttgtatttggagagagtgactattgaacttgaaaccttttattccgggcgtcttggtagtttctggtgggattcagtgggtgagagggaagaaggggaggttggggggctccttcccttcagaacttgaagtttctcccactgcctcctctccagtggtctcccaggtgccagacccaaaagcttttcctacagtgataccctttatttttacttccccttgactcatatgttttaacatgattttaacaaactgcacttattaagaaatgtgtttgccctgttttgtttggtttcgttttgttttctttgaataaatgacatggcacctcctagcaggaaggaagcagggttgaaaccctgaagtgttactgcagttggccgttaattggggtgggggcctctttaaagggaaattatttactcattcattaaacaacttaactgagggattcatgtgcctggccccgattttggtgctaaaaatgcacgcttaaacaagggtccctggtttaaaatccactagttcatttttaaagtgcttctcttgttctctacctctcacagtctaaaatccctccaggagtttttgagtaaaggacatggaacaggcctctaggtggagggatgggtgggactgatggggcagagaccagggctggtttgtttggcatcatcactgggcatccacagaccacctgcctcaggcctggcctgtgtgcagcacggaggacagttcctgcctgttctgtgtttggggctcatggggattccaggagcttcatgtttcagccagtgtgtgtgagccacctgctgtgttcttcagctgtcctggacagtgctggggacatagtatggccacggcagtcctggaccccgttctcacagagctcccactccagagagaacaaagacctgccagcaccaagtggtcagctgtgagagcctggggtggtgtgcagggagggcttcctggaggagtgagccagggtaaaagactccagattgcatccccatggcccatcttccccttccttagcaaccttatgtcttcgttccctcatacatgctgtgttcctggctccttgtgagagacaatgctgggccacaggagaagccaattcagccccaatcttccctggtgggagctcagagccttgtgaaggggagatgggcaacaaaaacaagggagggaaactgactagtctcagaatctcgggtagggcatcagaacgtgagaaggaaccaaggttggtggctaaaagggaccctagaatgcgccagagaggaggtggcagggcctttagtctggaaagtccccttcccttcatgtccatatgctgggctacagcgccctctgctggcctctcctggtaatgcctaggaatctgggttggtaaatagggacctccttggctttcttccacaactccagacctcaagggaatgcaaatggggaagctcttcctctgttctcagccagtttttctcacacgtctcatctccagtcccttgatgcccactcccttcagaataaaggaggtcaagccacttactatggcttatgaggccctgcatggcctagcacctggtaacatcgctggcgccctctctttctgctccccctttgaatatcaaatcagtgtttattttgttctgaggagccataagtcctttttggaacccacaaatgatgccatgaaccactgcattggagaatacagaggtacatggaattttgcataaaaattcatgaggttctcaaaacctccacagcccaatcatggctttcaagttagagctcctttcctatgccctgaccgtagtgaagtgcttgcagcaaccagaaccgtccgtacgtgccatcctcctcaagactcttccctaccttcctcttaacccagctcctactcgttcttcaggtcttagcttgagggtaccctcccagaaagaaggcttccttgaccctccagcctggggtggacagctccctcagccctctggatccatcaaagccctggccactgagtgacatgtctgtctactctgctggtaacacctaaatagagccccacccatcccatagggaaataaggaccagagttgtcttgtttcacacctgtagatttcctccaggtcctgggaacacaaaatgggaagttctatctcactatccatctcatgccagccagagacagggtatgatgacggaagtaagccaggctggtggctcacgcgcgtaatcccagcattttgagaggctgaagcgggaggattgcttgaggccaggagttggggactagcctgggcaacaaagtgggacccctggctctacaaaaaaattttaaaaattagccgggcgcggttgtgcgcgcctgtagtcccaagtactccaaaggctgaggcaggaggatcacttgagcacaggaatgtgaggttacttgaactgtgatcgcgccactgcattcgtctaggcgacaaagcgagaccctgtctcaaaaaaaaaaaaaaaaaaaagagtcaaggcttagtaatattcctgaattcctgaaggagttaagaaaggaaaaggacaagcgggggtctaaacgagagcacgaaccctcagcgtatgacggctccaggctccgggggaaagtcctttagccatccatcccaaaattaagcacgctgggagctggagtcacagcagtgataaaacgaacaatgattctggttcctactgactgacaggagaggtttaagggtctctcactctccggggagcccctttccttcctggctgcggagggcggagcccgagagaggcacgcatgcgcaatgcaacgtctgccttaggcccggaacttcggtgcctgggcgcagcggtgcacccggacccggaacattctcaggcgaaagtgtctcttgcgtgcgtgggccggaggttagtgtgcggggcccgccgggcggttgaaaagtccgagagaatcaggatggaggccgtggcgacggcgacggcggcgaaggaacccgataagggtgagatcttggtcacgcgcaggcggcgggtgggtgcggttgcggtgtctctaggaaatgattcccccaggaacgcgaagtaggactcgttttagggggacacccacccccctcagctttaccggtcctcttcactactttgcccagattattccctcccttgtcgcgggctgaccttcttttcctccattccttccccccgaaattaacctcttcccagttccagaccaatcctttccatgtccctaattcatttccttaccaggctaactctcaaattaacagaaacctctctaccccggcctaattcctgcattgcctcagaccagcccttctcaaattacctccttccctgtaccaagctgagccttcccttgctctctagacgaatcctcctacctttccaggctaaacttctacctgcctcatgcaaacttatcccaatctaacgattccttcatttcattgtaactcccgtttcccccaaagtccgaaatccagccaggctcctttcaaagtccttactcaatttctgtgctttcccacaaccttcaaagtaatccgacgtcgggtgaggtgtgattggaagcgtggctccaacaccactggccaagaattggtaattgtggaagccagatggagatgattggtatatggaggtagggggagaattgtcgttgtactttctacttttgtgtatgtttgaaattttctaaaaataaaaaatttaacctaaaaaaagtcttaaggccgggtgcagtggctcccgcttgtaatcccaacactttgggaggccaaggcaggagagttgcttgagcccaagagtttgagaccagcctgggcaagagagagaaacctgatctctataaacatttaaaaattagccaggcctggtggctagggagtagctaggacaagctactcaggagactaaggtgggagtgtcactcgaatcctttgagattgcagtgacctaagattattacaccactgcactccagcctctgcagcagagtgagacttgagcccaggagtttgagaccagcactggcaacatagccagaccccatctctacaaaaaatttaaaaattaaggccgggcccggtggcttacacctgtaatcgcagcactttggaaggcggaggcaggaagatcacctcaggtcaggagttggagaccagcctagccaacatagcgaaaccccatctctactaaaaatacaaatattagccaggcgtcgtggtatgtgcctgtaatcccagctactcgggaggctgaggcaccaactggaatcacttgaacccgggaggcggaggttgcagtgagcagagatcgcaccactgtactccagtctgggtaacagagcaaaactctgtctcaaaaaaaaaaaaattagccaggtttgatggtgcattcctgtggtcccggctactcaggagtctgaggcgggaggatcacttgagcccaggaggtcaaagctgcagtgagctgtgtttgcactattgcattgcagtctgagcaacagagcaagaccctgtttcaaaaaaaagaaaaaaaatttgtctcttggccccatctgtctccttcagagagtcatgtatacttggtcttcatttcctcgtctcctgctcacgactgtctgacttttctcctaagaaactgctctgattagggtctgcactgacttcccccatgttgttcaattcagtccccccattcaggtttttgtttgtttgtttgttttttgagagagtctcactctgttgcccaggctggagtgcagtggcatgatctcagctcactgcaacctccacctcccaggttcaagtgattcccgtgcctcagcctcccaagtagctgggatcacaggtgcccgccactatgcctgtctaattttgtatatttttagtagagatggggtttcaccatgttggccaggctggcctcgaacttctgacctcaagagatcctcctgcctcagcctcccatagtgctgggattacaggtgtgagccaccacacttggcccattcaggttttttttcttactagactggactagaattaaatgctgttgatccttccatcctttttgcatgttttcctttggcttcagcgacaccacagtgcctgatttcctgcctgtctctcaggctgctccttctcagcctgactttgtttcccaggggtgctgtaacaaagtactacaaactgcatggcttcaaacaacagaactttattctctcatagttctcaaggccagaaggctgaagtcagtgttgctgaactgaaatccaggtgtctgcagggtcgtgcttccccacaggctctgggagaaaacccatttcttgcctcttccagccagtggtggtttctggaattccttggcatgtggctacatcactccaatctctgcttccccttttgacgttgccttctttttttttaagacggagtctcgctctgttgaccaggctggagtacgtgatctcggttcactgcaacctctgcctccggagttcaaacaattctcctacctcagcctcctgagtacctgggactacaggagtgcgccaccacacctggctaattttttgtatttttggtagagcgccatgttggccaagctggtcttgagctcctgacctgaagtgattctctcaccttggcctcccaaagtgctgggattacaggggtgagccattgcaaccggcctctttttttttaagataacagtaatgggctccagggattacgatgtagctatcttttgcacagccagtttttagcttcagaggcatgtcctccccgcatctgtgcagtgctttttcctggaccctcttgtcatccctctcccactcccctgtgccctccccagtccctacctctcatttctcttggctttggttcttgtcttgattctgatgacacccacagctctgtctccagcccaacatttctctcctgaggagtctggaggcccgtgtagcagcagtcggaccattcccctggatgcctcccttacttccagcacgtcagccctgtggctcctccactcagcctcctgacatctttctgattcgctcactcatgatcctgttccttcctccacagcccctgcccttgtccagctcagtcttcagctgcatcagtgatttaaatcctccctgatacacacaacacatgtatgtcacctgtgacttctttcctccccaacccagccacgctgcttaaagttgtctctatattctgttttcacgtatttcctgcttgccgcaggcttgctccctccactcttgggaaacaagtctcaccaaggtttgcccagcgctccgctttcctgttttctttccatttttttgagacagagtcttcactctgtcacccaggctggagtgcaatggctgatctcggctcactgcaacctctgcctcatgggttcaagcgattcttgtgcctctgcttcctgagtagcagggattacaggtgcccaccaccatgcccagctgatttttgtatttttaatagagagagggtttcaccatgttggccaggctggtcttgaatttgtggcctcaagtgatctgcccacctcggcctcccaaagtgctggattacaggcatgagccatggtgcccagccagctttcctgttttctttgcccatattattgttgatcctgactgtctcccacatcagactgggtgctccctgagggcaggagctggactggattcatcctatggatcctcagcattgcctgacttagggcctctcagagatttagtgtttttttttctttttttttttttagagttttgctcttgttgcccagactggagtgcaatggcacgatcttggctcaccgcaacctctgcctcccaggttcaagctattctcctgcctcagcctcccgagtagctgggattacaggcatgtgccacaatggctgattttgtatttttagtagagacggggtttctcccagttggtcaggctggtcttgaaatcccgacctcaggtgatccacctgccacagcctcccaaagtgctgggattacaggcgcaagccaccgcgcccggcctaagatttagagttattaaagagtggttgggtgaacgcatgaatgcatgagagagtgaatgaatgagtaaacaaattagcaaatgtattaacgatttaaagaattgagtggatcaataagtcaggcctcagggcctttgcagtagttgttgcctctgcctggaattctcttttccaagagacctcatggcttaatccctcaccacctgaggtctctaatcaaatgtcacttttttggcaaagccttctctgagccttccatttaaaattgcagccttggccaggcatggtggtttacactgtaatctcagcactttggaagcctgaggcaggaggatcacttgaggccaggagttcaagaccagcctgggcaacacagcaagaccctgtctctaccaaaaaaaattaaaattaggccgggtccagtggtgcacgcctgtaattccagcactttggaagatcgaggtgggaggattgcctgagctcaagagattgagaccaccctgggcaacctagtgagaccttgtctttactgaaactttttttttttttttttaatttaaagattggcagggtgcaggccaggcgcagtggctcacgcctgtaatcccagcactttgggaggccgaggcgggtggatcacgaggtcaggagttcgagaccagcacagccaagatggtgaaaccctgtctgtactaaaaatacaaaaattagccgggcatggtggcaggtacctgtaatcccagctgctcgggaggctgaggcagagaattgcttgaacctgaggcggaggttgcagtgaatcaagattgctccactgcactccagcctgggcgaaagagcgagactccgtctcaaaaaaaaaaaaaaaaaaaaaaagattggcagggtgcagtggcacacacctgtaatcccagcactttgggaggccgaaggggagtggatcacctgaggtcaggagttggagaccagcctagccaacatagcgaaaccctgtctctactaaaaatacaaaaattaaccaggcatttggcttgtacctgtaatcccagctagttgggaggctgaggcaccaaccacaataacttgaacccaggaggcggcagttgcagtgggcagatctcacgccattgcactccagcctgggcaacaagagcaaaactccatctcaaaaaaaaaaaagaaaaaaaaatttaaagattaactgagtatggttgtgcatgcctgtagtcctggctgctcaggaggctgaggtgggaggattgcttgagcccaggagttcagggttacagtgaaccatggttgtgccattgcactccagcctggcaatggagcaaggccttatctcttaaaaaataaaaataaaaataggccagtcacagtggcttacacctttaatgcccagcactttgggaggccaaggcaggaggattgctggagccctggagttcgagaccagcctgagtaacatgtcaataccctgtctctacaaaaaatttaaaaattacacaggcatggtggtatatgcctgtggtcctagctacacgggaggctgagatgggaggatcgctcaagcccaggcggtcaaggctgcagtgagctgtgattgcgccctgcactccagcctgggtgaccgagcaagaccctgtctcgaaaataaaataaaattgcagcctcctccacctcttccctcctccttccctgtttatttttccgcataactccaggaaacacctaacacattatgttttcggtaattatgttgctaattgtttgtgtcccctactgaaatgtcaacttttgctcactgtggtttctctagtgcccagaacagtgcccagaatatagtcagtgcccagtaaatgtgagctgagtgagtgactaagcccccagtcccttcccacactcccatctctgaactaaccaatctctcctttcctcaggctgcatagagcctggacctgggcactggggtgagctgagccggacaccagtcccatctaaaccccaggacaaagtggaagcagctgaggcaacaccagtggccctggacagtgacacctccggggctgaaaatgcagcagtgagtgctatgctgcacgctgtagccgccagccgcctgcctgtttgcagccagcagcagggtgaacccgacttgacagagcatgagaaagtggccatcctggcccagctgtaccacgagaagccactggtgttcctggagcgcttccgcacaggcctccgtgaggagcatctggcctgctttggccacgtgcgtggcgaccaccgtgcagacttctactgtgctgaggtggcccggcagggcactgcccggccccgcaccctgcgtacccgcctgcgtaaccggcgctatgctgccctgcgagagctgatccaaggtgtgggggccagatgggcgacagtgggcacatatggggagggaggggagactgaggcagagggaattagagaaaagaatacaagagcagagacagagatcctgggagagaagttctgagacagagacagggacacaggaagagactgagacagaaatgtaaagtaagggggagagatagacaggggtccagggaagagaatgggacagacaatgagaatagatcagaatttagtagatgttagaagtggcatttcagattggtaggctgaggacacagtacacagtgctgtgataattggtcatacctaaggaacaaaacatgagatccctacctcataccatatacagaggcatcaggggaaaccaaaaggagtatgtacatgaccttggggacacagaagccttctgaacaagacacacggtgaaaaccatgaaggaaaaaaaagatagctttttgaccatgacataattaaaagcatccttgtgaccacaacaccagaaccaaagttaaaagatgagagtgaatgaagcagagtgagttaagttgccgttagggagaaggcacaagttatagagaggttcacagagaaagagagagaggctgggcatgatggcttatgcctgtaatcccagcactttgggaggtcaaggtgggtagattacttgagctcatgagttcaagaccagcctgggcaacatggcgaaatgctgtctctacaaaaaatacaaaaattagctgggtgtggtggcgccctagctactcagaaggctgaggtgggagaattgcttgagcctgggaggtggaagttgtgtgagctgagatcccaccactaagctctagcctgggcgataaagccagatcttgtctcaaaaaaaaaaaaaaaaaacacagatgtggaaatgaggatgaaaacagaaggaagatgggccgggcacagtcactcaagccggtgatcccagcactttgggagggcgaggtgggggtggacctgaggtcaggagttccagagcagcctggccaacatggtgaaaccccatctctactaaaaatacaaaaaaattagccacatgtggtggcaggcaactgtaatctcagttacttgggaggctgagggaggagaattacatgaatctgggaggtggaggttgccaaaaaaaaaaaaaaaagaagaaagatgaatgaggtgggggtaggtgacagaaactgaaaaaagcaggaaagatagaaagatggagataaaggaagagatggagagagatccagagccggggtgggtgataatccaagttggggagaaggagggatagaaactgaatctgctagaggctgggcacagtggctcagacctgtaatcccagcactttgggaggccgaggcaggcaaatcacttgagataaggagttcaagaccagcctggccaacatggtgaaaccccggctctactaaaaatacaaaaaaaattagccaggcactgtggcaggtgcctataatcccagctactcaggaggctgaggcaggagaatcacttgaacccgggaggcggaggttgcagttagagttaatcgagatcacaccactacactccagcctgggcaacagagcgagactccatctcaaaaaactgagtctgctagaggatgccacaaacagctgggggtaagattgctggcaggagtggggaagctgagcaggacagggacagtcacagcctatggtgctgcagaggccaggagtccgagcagtttctttgccctggactctgaagacacggctaggaccagtggaggggagggaccagggcaggtttaactgttatttgagggacagagtcactcgtgcagaaacaggcagccaggggtgatgcagggaactcaagttttggggtagtggggaagccaggcccacctgaggggttgctgcatagaggagcactcgagagaggatggatctagggccttccaccaccaggaggctttcccagggatacacgggcagatgccccacctgacctgatcccttgcacacacatgccaaatccacgtggatgtacacacatacacgccccacagtgaaggcgtgtccactgccagccagactagggccccacaaacaggcacacaacctagagacacacaacttctgctgcattgtcctgcatgctgacacccagacagacaggtgtctgtgggcatatgctgggcctcacaggacatgtgtgtgtacataggccatgtacacgtccatgggcaggagcttgtgcatcgtgcctggacacagttgtacacgagctccagaccgtcagagcctcagaggccaggatgtagccaggtctgcccatgcacacacatgcttggatgcatgaatacatgaatacacaggaagatagaggccgggccacatacacacactcaggtgcctgcacgagtaatcacatgcacatgacctcaggtgcctgcatgagtgcttgcgcacacagcttcaggcacctgcatgagtattcacgtgcatgcctcaggcgcctgcattattcacacgcacgcctcaggcgcctgcatgagtactcacgcgcacctcaggtgcctgcatgttttcctgtgtttttgaatgtgtgcatacacacacttggactgtgtatgcacatcatcccacaagcatgatcacacacatacccacatggacactatctgctcagtcgctcaccccatgcccaccctgtctctcctctgtgcagggggcgagtacttcagtgatgagcagatgcggttccgggcccccctgctatatgagcagtacatcgggcagtatctcacccaggaggagctcagtgcccgcaccccaacccaccagccccccaagcccgggtcccccgggagacctgcttgcccgctctccaacttgctgctccagtcctacgaggagcgggagctacagcagcgtctgctccaacagcaggaggaggaggaggcctgcttggaggaagaggaagaggaggaggacagtgacgaggaaggtgagggccagtagcaggaagaccccagattccagacaccccagccctaggcctgtctgtctccacttcatggcagcaggctgggcccccaacctgcaaaagccgacattgcgtccctcccctgcccagcctgactctctgtgtatgcccttccaaccgctgcagcatccccatcccccactctgaggcaccaaatgaaccctcgcctccaggtctggacaggctgttccctccgccaggaatgcctctcctcccacccttcaggtctcagatcctgacccgaggatacagtctccagagcactatatggtcatgtgttttatgcgtgtccctggagggcagggaccagggccatctctgtcactagtgtgttcccagagccacccagcgcaaggctgggcacaggagcagcagctctctgtggactctgtgctcagtgcctgcccgagtgcacccgcattcacaccccctctcctctccctctgcagaccagaggtcaggcaaggactcggaggcctgggttcccgactcggaggagaggctgatcctgcgagaggagttcaccagccgcatgcaccagcgcttcctagatggcaaggacggggactttgactacaggtgctcctgtgcctccacctccccatcccccagcccagcatcccacggcctttggtcacatgcagagcccttaacaagctgtgggggtctccctttgtggagctacaaggccccaaaacagttccaggatgtggggttgaacagccaaaggaagaggctgggtgacctcggactagccttgtccatctcagaccctcagtctcctcacctctaaggcaggggatggacagggatgacatatagctcagtatcaatgaaaccctgaaacacttccctcctggcaatggcagaggctactaccccaagccccccaagtctccctaggaagcccaacctcttccgcttcaccttggacctcctcatgctgcaggaagtaacccctggcaaagttcatgcccggcatggaggggcctgcactggctgcccccacagttacagttgttcatttctccagtagcaccccagggctgagacacgtgggccacctgctttggaaaaggacccaggagagtgatgtgtcagtcaaagattggttttgtcatttaaggtagctttgccttgtggtcccaaacactgggcccagcagcagaggaccctccttggtttcacatccagccccgatgacatgtgaaatgtgtgaccacacataagcggaccctacgtccgtcctgaggtgggctcatcaggaaagtgggaattgtgattgcccctgccgtggggcccagccatggtcaccagagcctcctcccattctgggatccctggctcttgaatggaatctggctgctccacttccagccaggcaggcctgctcagagccccagttcctgcacgcaaagtggtgagcagagggcctggaccatggggaccctcattcagcaggcatcactgctgttcccaagccagggcccaggaggaaattgggggtggcagggaccacagtgtgttgcctcgggagggcagcagtggccccgacgtgtcccccatccgtgcattcagttggcatgtgctgagcatctgtgatgtccacaggctctggggataaggcggggaccaaaaccaacgaaaggcttccctgcctgaaaaggggtcccactctagtgaggaagatctagaattttctagcacttcatggtgatggggccatgaggaaaagtgaagcagtgggaggggagtgacagggtggctagggaaggcctctctgaggggctgacagcaaaggcctgcaggaagtgggaggagcattcctggcagaggccatagtaggtgccagagcccccagcagcaccaaggggcagaaggggctggagcagtcgcaaggggtcgcaagggggtaggagatctctgagtggccaaatcaagctaggcttggcaacccaagtgcgtgctgctgggtttacttgctgccttagggcatgggcagctgtcctgcctgtggtcagctctggctaatcccggcctctatccactggagggcagtagcaagcccccagtgatgacgtcaaaatgtcaaaatgccgtgggggcaaaattacccccaagtggttctttgttgagagccactgcctgcttgagaatgtaagcccatgtgtcgccacattttacagctttttaagaaaaactagagctttggggttttttttagacagggtctcctttgtcacccaggctggaatgtggtggtttgatcatagctcaccgcagccttgacctcctggcctgaagtgagcctcccgcctcagccaactgagtaagctgggactacaggtgctcaccaccacgcctggctactttttcaatttttttgtagagacagggtctccctttgttgcccagggctccaactgctgggctcaagccatcttcctgccttggcctcccatagtgctgggattgcaggcatgagccaccatgcccagcccagagtttttgtgcaaactctgatttggaaaatgttcccttgagttttaaaccctgagagttttaaacactatctcccttgggagggtcagctctgacggctgccagcacatggcctttgacatcagggtgccccaggcctttgacctgggcatccgagggtcccagggagacccagtccttgacagcctcctcctcctgcagcacagtagacgacaaccccgacttcgacaacctcgacatcgtggcacgggatgaggaggagaggtactttgatgaggaagaacctgaggatgcgcccagcccagagctggatggggactgatggccgccacccttcccaccgcctgccccatccccatccccaacaaggcagctgattccaggcctgctcagtgaccctttctctagggggacatcagggcagtgccccacaacccacacacaccaccatctcactgggtctagtctcatctcagacaacccccacccccactgtttctggggttccctttctcatctctcccaccctgtctcctgcctctgtctttcttggtgtctgtctgggcttctttctgtctctttctgtctttctgtctctctccctacccccgctccctctttccagtgctctggctggctgtctctccctttctccccctctctctctgccttaggctctgtctccaccgcagggcccaaggtgaaagtcctccccttgccggaggccagctggcagggcctttcgtggctggaagtggccagtttggttccggtgctgacccctaggccccagcgcagctgcctcccgtgctgtctgtctccccctctctgtttatgtctgcgctgtgtctcacactcagagcctccttgcttctgttaggttcccatctctccttctgcctcactctgggcctcttctttctacttgtacatttccacctctctaggcctctgctctcactgtccctctctgtctgtctctcagcctttatctctgggttttgatcccccactccaggctctgggccccttcttcccccttccctcaaacctggctgctataggcagcagaaccctgaccactgagtaatacagccccaggggagggaggagaccccaggcagggaggatgggggcagctctcttctctccccaggacccaggctgtggatcacggggcctgccagcttgagtgtagagggaggggggactctacccttctcagccccaccagcccccctctgcccaaccacaattttcccttcctccgccttcctctccctctcctgtttacactccccaaatgcgcacaggctgttatcatgggtcctgagtcatcccacacacagcctgccccagcgtccctgcccccagctggccgcagggcccgccccatggagccccctgccgccctgggctaatgggagccagatggccgcctggtgactcagccaccgggcctgtgggaacccaggcgtcccgccttcccatgcccccacacccggctcctgctcccccagcagacacacacaggagggcctggccactgttgagggggcacacagggcaagggtcaccaagtcggggcctagggactcctcatgcctctgagatggaatggtggtatcctgccgtggccaagcctgaaggaccctcaaaactgcctcctggagtccacggttcctgacctccgagcctcagctatgccctctgggtcaaccagaattagagccagacagggaaagtgagagctggatggaggcagacaagatgctcagagcgactattaaagaacgaaagcctctgctacggagcgcttctgtcctctgtcaggcccgagcgaagtgcctgacaccgggttggatcctcagatggccccatgaactagtgaagtgggtcaaaggaggcctggaaagatgttgcttcctcaaggccactcggccatcagaggcagaaatgaaacaggaacccaggcctagaatcacaaaggtcctagaaaccacttggctgtctggcctctcaggtgtcagggccatccagagtgagacagcattggagggacaagtgtgcatgcagatgtcctcagacgggaaggtttgagaagggtcagatggtaggcgggcctaacaagggctccgtgctagccactgtcccgcacacagacaggatcaggtcatcttgatatggagatcagtccccaaatcactgaattgtcccagcagtgctatgccctaggtactaccaatatcactcctctatttcccagaggaggaagcagcagctagactccaggaccttggggtcatatctctcagaaagccaagagtgcaggatgagagctgtctgtctcttacctgcctgtatttgtgccccatttttaaagagcagagggcctgggccacaggaaaggtatcagcccttggtgataggcacattttttaccagtctatcatttggtcattaaatttgtttacaatatactttgctatacgtaaatttgttgtgtaggtttttaaaaagcgatgagagacacagaaattgagtcagaattagggttagtcagatggtcaagacgtgagcatctagctgacagacagaggtggagccagtcccagggacagggattagatggggagacaggaagagaggtggagacagagtggggtagggatgacgggagacacaccccctggtcactgcctctgagacctgggggtggtgggccccagggcgggtgcctcccatccccctcccagttctcccggggtcggggtaggtggaaaggctgagtcagggagggcgggccccgctgggagacaacccctaggtgggcatccggcccccacccccgtgtctcctgtccgtcctggccctggcctggctcgctggcctggccgccaccccgccccccacgtctgacacctccatgcgtcctgccaaagcaagctgcctccctgcactcttccccctccagctccagtcactctgtccctctgtcccccgtcccttctccctgcttctgtgcgtttctttccagccctctgccttcctccctcaccgccactgctctgtcttctcgttctgtctccacacctctggctgtcggtgtctccccgtgactttccgtctcccctctctctcctcccttgtttttcccatgcctctccctccctccctccctccctctcctccccaccttttccactccgtgtccccagccattctccatctctgttctcagctcctgtcacctcgtttccccatccctttctctgctggagtctccctctggggggctctgtcctctcctcactttgccctttccctctcgctgctgtgtgtcttggcccgccccccgtgccccccatctcctctgtctcccacactctgggaagcccggctgggatatccaggttggagcctcactggcggccactggaaacccagaatgaggggtcatcgcctctcgcccacccagaaagggcgcaggagggggcagcaaggttgcggggcctgtctggccagaaggaaatgtctgtgctgtggcctggtcacccccgcccccaggacctgctgggctgctgccgcccccggccggggctgaggccgagtaaacacagcaaacacagccgccggcagcctgggatatttataccgaggctgggcgtgggtccagtgcccaccacagcccctgccctgccctgccttgcctgctgccacagccagctccgagccagcgtggcaccagccggcaaggggacgcgccgcagacacagcctgcgctgggtatggaggccaacaggcactggccgctcatgatgcaggcggctccatggacgcaccctgtccccctcccctgaaaacaccagcacacaatgtggacccacactcgcagctgctcacaaacacacatccacccctgctgagaacgcgaaatcccctcaacgatgatgcaaaacagacccacacaactccacacactgcagtcaccagcctacatgtgggaacacagcatgcagacaccaccttagcacctgctcacagcacccacaggctgggaacaccagtccctgagatggacacacagccccgaagtacagccctccctcacacagacaaacactgagaaccacaggaagcatgctggatgcacaccacgtagacaaacatgctcagaataccagcgacacatgcactgatcacagtgcaacccagaaacaactcaactcatctgcctcatatgtaagaaacacacacggccgggcgcggtggctcatgcctgtgtctcagcactttgggagaccaaggtgggtggattacaaggtcaggagttcgagaccagcctggccaacatggtgaaatcccatctctactaaaaatacaaaaattagacgggtgtggtggtgggtgcctgtaatcccatctactcgggaggctgaggcaggagaatcgcttgagcctgggaggcggagcttgcagtgagacaagatcgcgccattgcactccagcccaggcgacagagcaagaccccgtcttacacatatacacacacactcactcccctctcctggagaaacaccattcccacagatgattaacatatgcagaaaacaccacatttcaagtcaaacttacacttaaaaatgcacaaatttacactcagaagaacagtgaagatgttgagaaaaatatcagacacacaatatgccccagatacatggccgacttgcagaatcaaacagtgccagagcataaaacccacagaaaatacaacagcttgcccagcagaaatacaaaatgcagacgcacaccccagaaatgcagcgcagccacaaacacacggagctaacacgtgctggggacacacatagacaagaccatccataccaaacagcacacaggcccccagaacacccatgccagacgcagctcacgccacaaagcttggaatcacgcacacaataagttcctgaacacacaaatccgaatccacactggaacctcaaatactctgcatgtccagagactaagggggaaggggctttctctcacccaccaatctccccactcccccttgctgacccgggtcccaggcccgtcttgggggcgggggagggggcaggaaggcctgagctggcctcccccagcagcttcctgccccacgggggctggacaggaagctggggctccagccggaacccaggctccccccacgacttccctctgtggccccgggccgcctgcagaggcaggggcggggcagggggaggaagcggggagccccaaaccccctgccctgcccctgcggtcggccacaggcgggggcagacttgtcccgacggggctgagccacccatcgggcctgggtgccagggtggcagggcaggggcagtgcgcacgcggccagaggaaggtgctgagcccacagtttcccctccccgccctgtggggctgtgccagctcagccggcagccctgggcaggtgggcggggtgtgtcatgagggcgtgttgggcaggccgaccacaccgcgaatgtgcagccagcacttgtcctcaggccgaggcacgagctggggctgggcatgtgagggccgcgtctgccaccctgggggtgtgtctgctccgtctgggaccctgggtgtgacagtgtgtctgggcgtgacgtgacggggtcgctgcaatctgtggggccctgtgggactccccaggctggaattgtgcgtgtgtggcggagggtgtgggatgtcagactgagtgggtaagaccgacctgctgtctgtgaggttgtgacgtgtcagacctctgtgtggggtgtgtctggtgggactgtgacaggtccgactgtggacatgcaccctggacctgtttgtgactgtgaacccatggaggaggaggtggctgttgagggatccatttcctgtccgggctctgatgccgtgatgcgtgtgcgtgcatgacactgtttgaatcagtgtctggtgtgcggtggttgcgaccatgaccctgtggaatatatttgtatatgactgtgttgtgccaggtccctattgaagtctctgctcgtgttgtgtcccagtgaggctccgaggctgggtggtgtttacgtgatgggctgacactttctctatttgtatctgtgtatatgtgggctgcagctgctgccaaatgacacagcccatgtgttacgggccctgcaggaatctctgtgtgtccacggcggctctgagaggtgaatatttgtgtagtgtggggcaccgtccgtgtttcccgccgtgtgagtgtgtctgcatgtgtacacgcaccacatcctcatagggctgcagcgattacagccgagtcactgtgtcctagcttgtgactctgcctcttggggccagacctcagcatctctatacctatccatttgttggcatgtccttgcatagtgaactcctgcctccccactcctccctcagccctgtgtgctttgggacctgaggccagaggagtaaccacatttctacccctatgctgagctgggagggccccaggtccctggcacccagacccagtgctgccaacagctctcatgcccacaggcaaaggaaccgcagcactcatactgtccttcctcccaggacaatcactgggtgtggggaagtgaaacctaggagaaagagcagaaactgagaggcaggagaaagaggaagcaggagagaattcacaagcaggaccatagcagatgggaagaaatggagacagcagagggagacccacctgtggctgctgccatttcttgcctggacagctggtctgtctgtgctcaccctcaccctgacacttctgtccactcccaaccatgagcaagacggcggaccctctgagcgcctaggtcaaaccctgccatggctcctgtcttccttgagtgcaagttctttttttttttttttttgagatggagtctcactctgttgcccaggctggagtgcagtggtgcgactttagctcactgcaacctctgcctcccctgttcatgcgattctcctgcctcaggcccctgagtagctgggatacaggtgtgcaccacaatgccagactaatttttttttgtattttttatttttatttatttatttgagatggagtctcactctgtctcccaggctggagtgaagtggcgtgatctcggctcactgcaacctccacctcccaggttcaagcgattctcctgcctcagcctcctgagtagctgagattacaggcgtgcgccaccatggctaatttttgtatttttagtagagactgggtttcaccatgttggtcaggctggtctcaaactcctgacctcgtgatctgcccgccttggcctcccaaagtgctgggattacaggcgtgagccactgcgcccagcctttttttgtattttagtagagacagggtttcaccatgtggtccaggctggtctcaaactcctgacctcaagtgatccccctgcctcagcctcccaaagtgctgggattgcaggtgtgagccaccgtgcccagtctttttttttttttttttttaaagatgcagtcttggctgggtgcgctggctcatgcttgtaatctcagcattttgggaggccgaggcgggcggatcacctcaggtcagaagttcgagaccagcctgaacaacatggtgaaacttcgtctctactaaaaaaaaatacaaaattagccgagcatggtggcgcatgcctgtaatcccagctacccagctacttgggaggctgaggcaggagaatcgcttaaacccgggaggcagaggttgtggtgagccaagatctcgacattgcactccagcctgggcaacaagagtgaaaatccgtctcaaaaaaaaaacataaaaaaaagatggagtcttgctttgtcacccaggctggcatacagtggcacagtcagggctcactgcagccttgacctcccaggatcaagtgatcctcccaccttagcctccagagtagctgggaccacaggtgtacattttttaaaagtgttttgtagagatagggtctcactatgttacccaggctggtctcaaatgcctggattcaagtaatcctcccatctctgcctcccaaaagtgctaggattacaggcgtgagccaccccgcctggcctgaactactatcttttattgtcttcttcactatcccccactaaagcaggttcctggtgggcaggaactcctcccttaacctctctgggcttgtttcctcacctttaaaatgggtgttatcagagtccctgcatctcagagtgttgctatggtgactgaatgagttcattaatgtaaggcacttcaacagtgcccaaggtgctcaataaatagatctaactacagtagtgttccccactggtcccctgtgccttgatgccgggcaaaggaatagtgcagacaggcaggaggaggcagagagggagagagagggagtgggagtgggggaacgtcagggatggagaccccaggcaggcgcccaatgacacagagatccgcagtcctctctccatctttaatggggccccaggtgggcttggggcacgggtgtccttaaatacagcccccatgggcaaggcagcgggggcggggcggggtggggccgggcctgccggggcggggcggggcggggcgggacctcagctgcacttgcaggagcgcacgatcatgttggacagctgctccaccttgggcttgcggcccacgtagtacacgatgggcagcggctccagcgcctgcggcacgcagcacggcgccgccgaggcgcccgggttatgctggttgtacagggccaggacctgcgggcggcgggcggggtcagggctcagggctcgtggagggaggaaaacggccctccactgccccatcccccacccgctaccgcgccagcctctctcacttcgtctctccccgcatcccctcttcccatctccaattcggtctctcttatcttctaacatcctatcttattctgtctctccccacctgtctgattttctttttgttttgagactgggtctcgctctgccacccaggctggagtatagtggcacgatcatggctcgctgcagcctcaacctcctgagcgcaagccatcctcccgcctcagcctccggagtagctccaaccacaggcaagcgccaccactcctagctttttttttttttttttttttttttttggtagagatgggatctcagtctgctgcctgggctactctcgaactcctgggctcaagcgatcctcctgcttcagcgtcccaaagtgttggtattaccatcgtgagccgccgcgcccgcctgattttctttctcagtctctgtccctcctcatcttcgcctcttgccttgttgtgtatctgtctttgtctctccttggcctaactctgtgtctgtatctgtctctctcattttgtctctccatttctgcgtttttccttccatctccctgtctctcttctccccttcacccccatccctctgttacttcactctgtgggtcttcatagctcatctccctctggcccctgctcagagcccctctctagcttcctgcctctctccccatctctttattcattcccctccccaccccatccctctctttctccccatcctgccaactcacctctctgactttacttctctttctctctcctcttcctccgtcctggctccccccaagcgcatctcgtagcccggtgggccagacgtaccttgctgtactgcgtgtccaggctccaaatgtaggggcagggcccgaggcagaagttggcatggtagcccttgggctcgtggatccacttccagccgaggtccttgcggaagtcaatgtacagctgccgcacgcagcagttcttctccgtggagctgcaggcaggagagacgcgtcaggggcagggaggggctaccaccatagaagccacatgcccctcctccccaggtgcgtgtgtcaccctaggttgcccccccagccctatctccatctgggtctcccttgcacccactgtgttaataacaacacaaatagtcatgataatcactaacacagattaagcacttcctccagtgctaagagcaatgtaataattaatttcacgcaatgcttaagacaagcctgtaagaagccagatgaccatccacgggggggctaaataaatcatggcatgccacaccctggaacatacaaaataacacagctccatgtaaactgatctgctctatttgtgcaacaaatgtttattgaactactactgtgtgctgggctgggatctactgtggactgaggacaaatgaaacagatagaaataggctaggcatggtggctcacacctttaatcccagcactttgggaggatgaagtgggaggatcgctggagtcgaggagttcgaggttgcagtgaactatgataacaccactgcatgccagcctggacaacaaagtgcaagaccctgtctctacaaaattttttttcaatttttttaaaaaagagacagaaatctctgccctccatgggcatgctataaattgtcttgtcactcctctgctctgaacctggctccatctcacggcaaatgcccaagtcctcaccgtgagccacaaggtgctatcaaatctggctgatctcaactccctctctcacgcctactccactccagccacactggcgtcctgtctgttcctcagacagtcttatttcggggctcctgcatctgctgttccctctgcctgccttgctagtcccacagatacccactccagcttgttccttcacttcatttcttctttttttttctatttttttttttttttttttttgagacagagtctcactctgtctgccaggctggagtgcagtggcatgatctcggctcactgcaacctccgcctcccaggttcaagcgattctcctgcctcagccttccgagtagctgggattacaggcgtgtgccaccatgcccggctaatttttttgtctttttagtagagacagggtttcaccatgttggccaggctggtctcgaactcctgaccttgtgatccgcccacctcagcctcccaaagtgctggtattacagacctgagccactgcatctggcctatttattctttttaatttgttattctttttagagacacggtctcactatgttgctgaggctggtgtcgaacttgggctcaaacgatccgcacgcctcggcctcccaaagcattgggattactggcatgagccaccacacctggccccttcacttcatttaaaccttagctcaaatgtccttcactcagggacccttaactcctaaagcagtgtctggaatgcagtaggtactagtaaatatcagttacatgactgaacatcacctcctcagagatacctttctgagccatcctttccaaaatatccaagtgactgttagttccatttagtgcaatacggtattgcagttatgcaagaaaatataaaaatgtctgcatttgaaatggggcaaaatcttaattaccgatgacgctggatgagagtttacgggcattcattatcttcattgcttttgtatacatttgaaattttccataataaaggaatttaaatcagaataggaaaaataacagttcccaatatctattactctctgcctgccttcttctggtttattttacttcttagaactgtcaaagaggccgggtgcagtggctcacgcctgtaatcccagcactttgggaggccaaggcgggtggatcacctgagatcaggagattgagaccagcctgaccaacatggcgaaaccccgtctctactaaaaatacaaaaattagctgggtgtggcggtgcttgtctgtaatcccagctactcaggaggctgaggcacaagaatctgcttgaacccaagaagcagaggttgcagtgagccaagatcgtgccactgcactccacccagggcaacagggtgagactctgtcttgaaaagaaaagaaaaaagaaagaaaagaaaagaaaaagttgacaatgccttttttttttttttttttttttgagacagagtcttgctccgtcacccaggctggagtgcagtggtgcaatcttggctcactgcaacctctgctcatagattggtggggccagccaggcacggtggctcacgcctgtcatcccggcactttgggaggctagggcaggcagacttgaggaccctgtctttactaaaaattcaaaaattagctggacctggtggcgggcacctgtaatcccagctactggggagtctgaggcaggagaatcgcttgaacccaacttcaagtggcaccggataacctagaggcaagataaagcctttccaagagccacagaagcctgagaaggaagtcaagaaactgagatccctgtgaactcagcccgtaccacccaatttggttggacctcagtttcctcatctgttcagaggtaggagctactagataaaataaggtgttaagctgagggccaaggggccatcatgggcaggcttagggagggccatgagtgcctgagatcatatgcacatgtgtgtatgtatgcatgtatttctgggaaaaagagtcctggctttcactttctcacaggaagttctgaactcacaaaaggggaagaactagtgtccggaatctttttttttttttgagatggagtttccctcctgttgcccaggctggagtgcgatggtgtgatctcagctcactgcaacctccgtctcccgggttcaagcaattctcctgcctcagcctctcaagtacctgggattacaggcatgtgccaccatgcctggctaattttttgtatttttagtagaggctgggtttcaccatgttggtcaggctggtctcaaactcctgacctcaggtgacccacccacctcggcctcccaaagtgctgggattacaggcatgagccaccgcacccggctcagaatcatctttaatatgcagttcaaccctagctggggttctgagatcctaggatttgaacaatctgtgatactgttatccaagtcagcagctctccacgtgagctcccaggaccagcggcagcatcacctgggaactatgggaaatgcagattctcaggtggcaccccaggccactgaaatcagaaattgtgtgcaggactgggaacaacagtccgtgttgaacaagccgtctaggtgatcctctgactcattttttcagcacacattcggggcctaccctgcaccgggccttgggatacccacagcccttgcccttgccaagcctcttccgtccagtctctcaagacctaggccaggtgcagtgactcacgcctgtaatctcagcactttgggaagccaagaccggtgaatcgcttgagcccaaggagtttaagaccagcctggggagcatagtgagaccctgtcgctacaaaactttttataaataaaagacccaacagagactgtttgttgagtcaaagatctacttagggccccaggggagcccagaggcctcacatccatcttggatgttggagaaaggggttaggaaggaggtagtgttcgagctgccttaagaacaaattttcctatgaaagttttttttttttttttttgagatggagtcttgctctgttgccccaggctggagtgcagtggtgcaatcttggctcactgcaacctccatgtcccaagttcaagcaattctcctggctcagcctcccaagtagctgggattacaggcacacaccaccatacccagctaatttttctgtatttttagtagagacagggtttcaccatgttggacaggctggtctcgaactcctgacctcatgtgatccacccgcctcagccttccaaagtgctgggattacaggtgtgagccaccgcgtccagctggaaagtttcagatgtacacaaaagcagcttcaacaatgaccaactcatggccaatttccattgcatctctacccctatccactatctcttttttttttttttttgagacaggatctcactctgtcacccaggctggagtgcagtggtgcaatcacagctcactgtggcctccagctcctggggctcaagccaacctcccacctcagcctcctgagtagctgggacaaaaggtacacaccaccaggcccagctacttttcatatttttttttttgggagatggggtttcaccatattgcccaggctggtctccaactcttaggctcaagcaatcctcctgccttggcctcccaaagtggtgggattatagctgtgagccactgcagccagccgacaatggtttatctcaaagcacatgcaatccaccgtgttgcttcatccataaatatttcaaatgtatctctaattaagactactttaaaacacagtcacaataccatgtaagaaaattaacaattccttgatatctagaggaatatctagacagagttcacatttacccaactgtctcataaatatcttttttttttaagcctgtgtaaataaggattcaagtaaggtctacacattgcaattggttgatatgtctcttaggatttttttttttttttaatttttgagatggagtctcactctgtcacccaggatgcagtgaagtggtgcaatctcgggtcactgcaacctgtgcctcccaggttcaagtgattctcctgcctcagtctcccaagtagctaagactacaggcgcctgccaccataccctgctaatttttgtatttttaattatttatttatttttttgagacgggagtctcactcttgttgcccaggctggagtgcaatggcgcgacctcggctcactgcaacctccacttcctgggttcaagcagttctcctgcctcagcctcaagagtagctgggattacagggcccgccaccacgcctggctcatttttgaatttttagtagagaggaggtttcaccacgttggccagactggtctcgaactcctgacctcaggtggtccacccaccttggcctcccaaagtgctgggattacaggtgtgagccacgacagctggcctgatttttgtatttttagtacagacagggtttcaccatgttggccaggctggtctccaactcctgacctcaagtgatccacctgcctcagcctcccaaagtgctgggattacgggtgtgagctaccatacctggcctctcttaggacttttttcaaaatctacaaaatcatctctctctctctctgtatatatattcagggtcaactatatatagactgacccttggacatgggtttgaactacatgggtcctcttacaaaattcaccacttacaggtgaatttttcttccacctctgccctgagacagcaagaccaacaccttttcttcctcctcctcagcctactcaacatgaagacctttatgataagccacttccactcaatgaatggaaaatatacttcctcttccttatgattttcttaaggacattttcttttctctatcttatttttaaaatgcaggcataggccgggagcagtggttcaagcctgtaaggccagcactttgggaggccgaggctgatggatcacctgaggtcaggagttcaagaccagcctggccaacatggtgaaaccccgtctctactaaaaatacaaaaattacccgggtgcgatggcggatgcctgaaatcacagctatttgggagactgaggcaggagaattgcttgaacctgggaggcggaggttgcagtgagctgagatcacttcactgcactccagcctgggtgacacagctagactctgtctcaaaaaaaaaaacaaagaatacggccgggtgcgtggctcacccctgcaatcccagcactttgggaggctgaggcgggtagatcacttgaggtcaggagttcaagaccagcctggccaacatggtgaaaccccacctctactaaaaatacaaaagttagccgggcatggtggcaggtgcctataatcccaactactcaggaggctgaagcaggagaattgcttgaacccccgggaggtggaggttgccgtgagctgagattgtgccattacactccagcctgagtgacaacagcgaaactccgtctcaaaaaaaaaaaaaggggatataggacataatacataaaacatgcaaaatatgtattattcggccgggagcagtggctcatgcctgtaatcctagcactttgggaggctgaggtgggcggattgcctgacctcaggagttcaagaccagcctgggcaatacggtgaaaccccatctctactaaaatacaaaaaattagctgggcgtggcggtgggcacctgtggtcccagctactcgggaggctgaagcaagagaatcacttgaacccgggaggcagaagctgcagtgagccgagaccgcaccactgcactccagcctgaatgacagagactctgtctccaaaaaaaaaaaaaagtattaatcaactgtttatgttgtggataaagcagaattccagtccacagtaggctattaatagttaagtttttggggagtcaaaacttgtatgtgaatttttggttgcatggggggtacgtgtgtgtgtgtgtgtgctttccccttctttgcattgtatttgatgaagaaactgggtgaggtttcttgcagtctgagttttgctgaccatttcctctgttcctgtctttctagaaaactgttaggatctacagtcctgatcagattcaggtttgatttttttttttttttcctgagacaaggtcctgctctgtcctgaaatgcagtggcgtgatcctggctgactgcagccacaacctcctaggctcaagcactcctgcctcagcctcccaagtagctgggactacaggcacacaccacccagccagctagtttttttgtatttcttgtacagaggcagggttttaacatgttgcacaagctggtcttgaactcctaagctcaagcgatctgcctgccttggcctcccaaagtgctgggattacaggcatgagccaccgcacctggccttcaggtttgattttttgccaagacttcctaggcaacattgggtccctccctacggaggctgacatggctggctatctccctttgtaatgtcaggagctgttggcactcaagacctcaatttgtggccgggcgcagtggttcatgcctgtaatcccagcactttgggaggccgaggcgggtggatcacgaggtcaggagttcgagaccagcctgaccaacatggtgaaacccagtgtctactaaaaaaaccaaaaattagccgggtgtggtggcacacgcctgtaatcccagctactcaggaggctgaggcaggagaatcacttgaacctgggaggcggaggttgcagtgagccgagatcacgccactgcactccagcctgggcaacagagcgagactctgtctcaaaaaagacctcaatttgttcattgacagcgttgctgggctgatggcgctaagatctggtggtgaaggagcctgggagcagggctgattttctggcagggaaacagccggtaacaaagcccagagacaggaccaaaatattttaagcaagggaggaataaggtcagatgatcactctaaatttacaacattctaactctccatttcaactttctaggaatccaacatttcagctttcttagattgcagtattagcattccagcatcttatgattctaacattctgacagcatcttcaactctctaggattccccctttccaacctttgaggatcttggcattcctgaattccagtatgccagtattgcatcccaacattccaaagttctgagccatcactcaagaggttcaaactgacactttctttcttttttttttttttttttttttttagatggagtctcgcatcattgcccaggccggagtgcagtggcgcgatctcggttcactgcaacctccacccccgaggttccagtgattctcctgccccagcctgggtacctggatagccgtaatcccagccgagtagctgggattacaggtgccagccaccacacctggctaatttttgtatttttaatagagatggggtttcaccatgttggccaggctggtcttgaactccagacctcagggatccgcccacctcagcctcccaaagtgctggaattataggcgtgagccaccgcgcccagcctgctgccactttctattaataaaatcccagcattctaatattctaacattccaacactgagttccaacatgctgagataccaatattctgctttctccaactccaacatttgtggatgtgaatatttcaaaacagaattctaccactgtgagcccaatattcaaggactccaatctgccaacactggtatccacaattggccagtggtgcaggaattccacatgggccatcttcccattttgaatccccaaattctaggattccaatgtttcagctttccttgagtccgacattttccatttcagtaattaacaccaaattctagcattctagaatcccagcattctagaacctcaacctgccaacaatttagggattcaagatggtgaccttccaactttgaattccaacaatcacagggttcaactttctaacattctgtgattccaacactccagcaagaaagcaaggctgggcgtggtggctcacacctgtaatcccagcacttcgggaggctgaggcaggcggatcacgaggtcaggagatcaagaccatcctggctaacatggtgaaacccagtctctactaaagatacaaaaaattaggccgggcgcgttggctcacgcctgtaatcccagcactttgggaggctgaggtgggtgtatcacgaggtcaggagatggagaccatcctggctaacacagtgaaaccccatctctactaaaaatacaaaaaaattagctgggcgtggtggcacgtgcctgtagtcctagctactcgggaggctgagacaggagaatcgtgtgaacccgggaggtggagcttgcagtgaatcaagatagcgccactgcactccagcccaggtgacagagcgagactctgtctcaaaaaaaaaaaaaaaaaaaaaaaaaggaacctgatcccaacattacaagactcccagttctttttttgttttttgtggctgggattataggcgcccaccacgcctggctaatttttggatttttagtagagacgggtttcaccatgttggccagacaggtctcaaactcctcacttcaggtgatccacctgcctcagcctcccaaagtgttgggattacaggcgtgagccaccgcacctggcacaagactcctggttcttacacccagacctcatcccctgagccctccaagctaaaggagacagatgctcagcccaagcacagcagcagccaggtgtccaacctggagcacctggtcagcagatggcagtcatgcccccagcctggaaggcctccatccaggctacaaggctcacctgaagcaatagttggtgtccagggctcggcggtgccgggagctttgcagatgctgggccctctccagcggggtggccatgagaagcaggaaaggccggttcatgccatgaatggtggccaggtcacctcggcggccggtagtgaaccctgctttggtgtgggagtcaggggataggggacatacacacacactctcagagggatagataagtggggcgtggggcagatgggaacacacacacgcacacacgtcacaactgggcatggccggggaagcaggcctcaccgttgatgtccacttgcagtgtgttatccctgctgtcacaggagcagtgggcgctaaggcgaaagccctcaatttcccctgtaggagtggcgagagggaagccagtctgagagtgcagctcacccagcccctggaggaagaggaaggaaggagcaaaccccaggggcttccttcctgcctcccccacccaccccactctgccctctcactgcagctctctctttttttttttttttttttttttgagacaaggtctcgcagcctcaatctccaaggcccaagcaatcctcccatctcagcctcccgagtagctgggaccacaggcgcgtgctaccacgcatggctaattttttttttttttttgagatggagtctggctctgttgcccaggctggagttcagtggcgtgatatcagctcactgcaacctccacctcccaggttcaaacgattctcctgcctcagcctcccaagtagctgggataacaggcatgcgccaccacacccggctaattttttgtatttttagtagagatggggtttcaccatgctggccaggctggtctcaaactcctgacctcaggtgatccgcctgccttggcatcccaaagtgctgggattacaggcttgagccactgcatccggcctacacggctactttttaaattctctgtagagacagaggtctcactatgttgcccaggctgggctcaagcaatcctcctgccctggcctcccgaagtgctgggattacaggcatgagccactgcacccagccagcatcaatctcttgaatgaatgagtgaatgatgttttctaggctcctacaatgtgccgaagcctgtgctgtgtgcttgggactcagcattgaccaagacagatgagctccttctaggcctttgtcgaacagcccaggacactcctcccagtgcccacctgctccctaatccctattttttctttttcttttcttttttttttttgagacggagtttcactgttgttgcccaggctggagtgcaatggcacgatcttggctcactgaaacctccacctcctgggttcaagcaattctcctgcctcagcctcccgagtagctgggattacaggcatgcatcaccacgccgagctaattatgtatttttagtagagacggggtttctccatgttggtcaggctggtctcgaactcccgatctcaggtgatccacccacctcggcctctcaaagtgctgggattacaggcgtgagccaccatgccaggccccctaatcccttttttttcatgtggccaaactactatttatcctgtgagtctccacacaatcaccctcacccagcaagccctcctagactccccagatgggtccaggtgccttctctgggctcccaacagcacttagggcgttcccccatcctgcatgcctccctgtcccagccttgtcctccctgctggtgcctccccatcccattcttgatcattctaggtcattcctgcctggtggggccttgacaagatctcttaggtgtccagaagtgactgtgggccccatgagggcagaactgagggctgtcttggttatcactatgtcccccacaccacccagcacatggccaggcacacagcaggaacctgtgggcaattattgaataaaagcataaatgagagggaggtgagggagagagataggggcaccatgggccctgccagaaaccagacagagacaatcatctcctggacagatcaaatgagttagttaggctctccctggcctccaggcctttgcacaggctgttccctttgcctggaatcttttttttttttttttttttgagatgggatctcactctttcatgtaggctggattgcagtagtgtgattatgactcactgcagcctcgacctcccaggctcaggtgattctcccacctcagtctcccaagcagctggaactacaggcacgtaacagcatgcatggctaatttttgtatttttgtgtagagaccgggtttcgccatgttgcccaggctgctctcaaaactcctgagctccagtgatccatcctccttggccttcaaaagtgctgggattataggcataagccaccatgcccagccccagaatactcttacacctctccttttcctgaccattctactcatcccttcaacatcagctatggtgcccctcctccaggaagccctccctgattctgggctgggtcaggtacctcctttgggctccccatcccagtcccacccactctgggtcatcactgccttacaggtctgttccccagctacctagccaatggactatatgagctctgtgagggcaaggatggggctgttttggtcattgctgtgtccttggcatcacccatcacagggcagggcagagaggtgctcaggaaacagattagccaatcactcaggtttccatgccacagaggggagccaggtctcagcactttcacaccagtatggggcggagaggggtcctaggcaaagtgaccccaggacaaacaatggggtggaccccagggagaaacaggggtgggacacacaagtaatcctcacctccacggctcaaccactgccgcacaactccggtgacatcaaaagataaccactctggcgagtcgctgggtgccagcagccggttgctgaggtatcgccaggaattgttgctgtatttctagaggatgatgaaggcaggagagagacagtgggtagatggtgtcacgaccccacatacactaactgaatccttcaccccatctgcttccccaaacaggcttccagaaagttcccaggcactaccctctcagacagccacctgtgtggtcctgtggcacccatcctccccaacagtacccatgagaggaggggtggagaaaaagctcaggctgcggtcaagtcaccttcacacagctcagccgaaggtgttttcttgccttctcgaggcctgtttcctcattggtgaaatgctaagccccactcagcgtggacagcccacaatgctaaaattctgctgctaacattctgggccgggcgcagtggctcacgcctgtaatcccagcactttgggagcccaaggtgggtggatcacttgaggtcaggagttcaagaccagcctggccaacatagtgaaaccccatctctactaaaaatacaaaaattagccaggcatggtggcacacgcctgtagtcgccactatttgggaggctgaggcaggagaattgcttgagcccgggagacacagactgcagtgagccaagatcacgccactgcactccagcctgggcgacaggacgagacttcgtctcaaaataataataataaataaaataaaattctgctgcaaacattctggggtttactgagcatacggttctgcaaatttgacaccctgaattctcagtaacttagaagtcatttctaatgattccggctgggcacggtggctcacgcctgttatcccagcactttgggaggccaaggcgggtggatctcctgaggtcaggagttcaagaccagcctggccaacaaagtgaaacctcgtctctactaaaaatacaaaaattagccaggcgtggtggcacacgcctgtaatcccagctactcaggaggctgaggcaggagaatcacttgaacccaagacacagaggttgcagtgagccgagattgcaccactgcactctagccagggtgacagagtgagactctgtctcaaaaaaaaaaaaagtcattttgtgattcaaatgtttgataatatcccaagatttccacttctagagcctgagaagctttagaagactaatgttctataaacccaagagtctgccatgccgcacctagatgctgcaggtacccaacatctgtgtagaataattttctgggccaggcacagtcgctcacgcttgtaatcccagcactttgggaggccgaggagggtggatcaccagaggtcagaagttcgagaccagcctgaccaatatggagaaacaccgtctctactaaaaatacaaaattagctaggtgtggtggtgcatgcctgtaatcccagctgctcgggtggctgaggcaggagaatcgcttgaacccaggaagcaaaggttgtggtgagccaagatggtgccattgcactccagcctgggcaacaggagcaaaactccatcacacacacacacaaaaaaaagaagaattttctggggctggatagtccactccagggactgcagaataaagctgaattccccagactccaagaagccaagctaacataggacaaagttctctcactgtgaaagtctgaaatctaccatcctatgagttaacattccctctgatatggattctagctcatagaaactgctagagcctccagcccttccagatgccccagtcctcttggaagctccctatcttctagagcagtgctgtcctaaagaactttctggaaatgtgctttatctgcaacatccaaaatagtagctgctaaccacatgtgactatagagtactagaaatatggccagtgagaatgaggatttctttttcatttttatttttttgagacagagtctcgctctgttgcccaggctggagtgcagtggtatgatctccgctcactgcagtctccacctcctggggtcaagcgattctcccacctcagcctcccaagtagctgggattacaggtgcctgccaccacacctggctaatttttgtatttttagtagagatggagtttcgtcatgttggccaggctggtcttgaactcctgacctcaagtgatccacccaccctggcctcccaaagtgctgggattgcaggcatgagccaccacgcctggcctatatatatatatttttgagacggtctcgctccatcacccaggctggaatgcagtggtgcaatcacagttcactacagcctcgacctcctgggctcaatcaatcctcccacctcagactactgagtagctgggactagaggcacgcatcaccataacaggctaattttagtattttttgtagagacgaagtttcaacatgttgcccagactggtctcggactcctgggctcaagcaatctgcctgcctcggcttcccaaagttctgggattagaggtgtgagccactatgcctggccctaaatttttaatttaattttaaacaatttaaattttaatcaagctaaatgtgactagtggctgtcatattggacagaatgattctagagcccccaaccttttcagagattccaactttcaagaatcctgtgtccttaaagagtccaactcctaagattccagccttctaagtgtttaacatcctaggatgcaaagagtctgaacatttaaaagtgctctaggttccgggtgcagtggctcacacctgtaatcccagcactctgggaggctcaggtaggagaatcacttgagggcaggagtttgagacaagcctggccaacatgataaaactctgtctctactaaaaatacaaaaattagcccagcgtgttggcacatgcctgtaatcccagctactcgggtggctgaggcaggagaatcacttgaacccaggaggcggaggttgcagtgagccgagatcaccccattgtactccagcctgggcgacagagcaagactccatctcaaaaaaaaaaaaaaaaaaaaaagaggccaggcgcagtggctcacgcctgtaatctgagcactttgggagaccgaggcaggtggatcacgaggtcaggagatcgagaccatcctggccaacatggtaaaaccccatctctaccaaaaatacaaaaattagctgggcgtggtggcgcacacctgtaatcccagctacttgggaggctgaggcaggagaatcactggaacccaggaggcggagattgcagtgagctgaggtcataccactgcactccagcttggcaacagagtgagacactgtctcaaaaaaaaaaaaaaagcgttctaggattgtatggtttgtgttcttctatccttcagggaccatctaggtggaccttgtaaccagccgacccacagccacccccttggtcacagctcaccctctccagcccatgccctgaccttccttctggctcatgtcctcacctggtacagctccacgtgctgctccacttttaacttgagcctcagcagacgcagctctgcccgggagagcaacacgggttcaggtaccgcttctcggagctctgatgtgttgaagaacatatatatgctgtgtgtactctgcttgaacttgtcatagatttctagcagggagaaatgaagggaggcgatcaggggtttggcagaggtgaggggagctggtgctcccaactctaggagttttggagctgacagctctggggtggagtcagtctctgataccttttatttatttatttatttatttatttatttatttatttatttaaatgaatttttttttttttttgagacggagactcgctctgtcacccaggcttggagtgcagtggcgcaatctctgctcactgcaacctccgcctccagggttcaagcaattctcctgcctcagcctcccgagcagctgggactaaaggctcatgccaccatgcccagctaatttttgtatttttagtagagatggggtttcaccatgttggccaggatggtctcgatctcctgacctcgtgatccacccgcctcggcctcccaaagtgctgggattacaggtgtgagccaccacgcccagccctgactgtgatactttttagctgtgtgaccttgaggaagtggtttctccccctaggtttgtttcctcctctgtaaaataggtcctaaccacattcctctctcatgtagcatcatctctcaagtcgactaaggctggcaccaaggggaaccactctgtttgctctggccttccttgccccaaatgcaagagcccctaaaatgcagagtaaggatcaaaggcacaggctttggactcagatagtgcctctgctgcctcttggctgtgtgaccatgggcagttaacaccctctttctgaatgtcagtttcctgttattctttgaaaaacagcaataacattaagctccctgcattcccacacagactctcctaatttaagcgctgtgtaaccttgggcaagtgaattcctctctctgagccaggtgtaagacaagacagagtgactctagaacccattccagtattatagtgggaaattagatgacccaggtcaagccatgtggcaccaattctgcatacactggtcactcaatcatgtatacgtctaagagtgctggctgggcgcagtggctcacgcctgtaatcccagcactttgggaggccgaggtggattgattacttgaggtcgggagttcgagaccagcctggccaacatggtgaaaccccgtttctactaaaaatacaaaaattggccaggcatggtgccggacggctctaatcccagctacttgggaggttgaggcatgagaatcgcttgaacctgagaggcagaggttatagtgtgccgagattgcgccactgcactccagcctgggtgacagagtaagactctgtctcaaaaacaacaacaacaaaaaaccacaaaacagcgctatttaccagatgctatctaaagcactttacaaagatgaagacatttaaacctcacaaccttatactattattatacccgtttaatagatgagaaactgaggcaccgagattaagtaatttgccccaaggtcacatagctgcagactgggattcaaactcaagctgtctcattccagagactgtgctttttttttttcttcccccaagagacagggtctcactctgtcccccagacggaagtgcagtagcacaaccatggctcacggcaggctggaactcctgggctcaagggatcctcacgcctcagcctcccaatatgttgagatcacaggcatgagccaccacacccacccagctagagactgtgctcttaacccctaagtgattcttctacttatttttattattagttttccacccttaactcccttccccagctggttagggaaagtgaagttcattctgggtaggaatggctgtagtggggagaaaaggaattaaggtgttttcttttctttttttttttttttttttgagatggagtttctgtcgcccaggctggagtgcagtggcgcgatcttggctcatagcaacctctgcctcccaggttcaagcgattctcctgcctcagcctcccaagtagctgggattacaggcgccgcccgccaccccgcccagctaatttttgtatttttagtagagaccgggtttcaccatgttggccaggctggtctccaactcctgacctcaggtggtccacccaccttggcctcccaaagtgctgggattacaggcgtgagccaccgcgcccagccaaggtattttctagtttaggaaaagtttggggatggggatgagggaacaggccatgaactgctggatcaactggggcaactgcttccagcctcccatagtgggggtgtgaaaagagactggtgagaaaggcagaggaaacccctcccctacggcccccttcgatcctcctcctcctccccagtctccctccccacccagccccagtaagccctattcttggcccggaggttactcagcaaaccccaaaggaaaggcagagccttggctggggaagacagatagggaggaagacagagaggagggagaggaagggttggagggtgatgcagagagggagaggcggggagatgtcagagacggagacgaggcaacaggaccgtggaggagaaaaatagaaagggagagaaaatagtcggagagacaaaaaccaggagacccatgcgtggacagaaagactaacggagacgaaaagaaagaggcagatggggagacacgtgcgagacgagacacatgtgcatttgttggggagaagaggattggaggtgtcagtgttaaaggaacctctacaacgaaggtgaagccacggaagataaggtaaggctgagacttgggtgcggagtgcgcgtcattgggctggagctgtaaactggcgcagaaatgggcagggaacccgcaagcccacaccgcccaagagtcagtgaaacctgagggatcttccccaaggctctgaaccacgcgggacgcctgggtcctcgcatggatgccgacggggccggctgagtgggagccccgcccgtagctggggtgaggagggcgggaggcgccgcagccaggagggcggggaccagacctgccccgtctcgccccgggctccgcgagcgatccccgcctccgccgggggcatgggaaggaaagggaagggagggggatgaggccgccggacgctggggtttccccagccaccctgagaggaactgggactttggggtccagactgccagcgtttagcgcagcggggtcctcctgccccttggtggaagcgcaggctcctccccccgcgcgtggcacccacgtggggctttctcactcctcccagcttggttttctcacctcggtcttgtagagtcaccccccacccagcacttcccctgcggctggactccgctcagcccattcccctgcatcctgcggggaatgcagcgtggatggcgctgggtatctctcctcctccccgctcacaccacctttcccacgcctgtctcccctctcggtaaagcccttcccatgacccaggactctaggtcttctggaagctcgattcctccgctgggctccccactctgtccctcacgtccctgtgtgaaacaccgaggacacctctgcatcccgggcgccctcccgagtctccgctcctctcccgcttgcctcctccttccaataacctcccgtccctttctccccacatttatcacacgcacctctgtttctctttctacgactctcccccacccccgcatcccgcgtgttcctggcagcctctggaagtgggtccgctctcactttcctggcaccctctggggttgccttcatctagcttttctgtccttcttgaatctttccacctcaggacccccaagctctgggtcaactttctccagcgcctctcctttcccaaatgctggggtcttcgcttctcccacaccaggctcccttctctgcacctggcaccccacgacccccccccccattcaacgcgtcctggaagagggagccttctaccctccccctattgcttgtctccctctaggggactgcccccacgaccccgcatgtttctgtcgcactctagaagcggtccacttcgctatctcctcctctccaagaccagacacctgggtggtagggggctcagtgccatcctctttcggacacccccctcccaccatcacacgttccctttgccccggggtgtcctcttcctccagccagtttcttctgccagtcacttcctacccgtggccccggcactccggcgccccctgggggcccccctcccggctcccctgcccctccgagctcaccgttgtgggtttccaccattagcacgcgggtgacctccttggcgtagtagtcggcctcaggctcgggctccggttctgcactctccccggccacccggtcgcgggtgctgttgtacagggcgagcacggcctcgggcagcgggccgggcggcacctccccctggctcggggggctggcgagccgcagcttggacaggatctggccgcggatggcctcgatgcgcttccgcttcaccagctccatgtcgatagtcttgcaggtggatagtcccgcggccggccggccaggcgtcagcaccagtagccacagcagcggtagcagcagcggcagcagccgcagcccggagggcggcatgggggaggcggcgccccccggcactgccgagagcgcgaacagggctggtgtggtggggaggccccgcccctgcaggggctgggggtctcccggcaaaaggtaggagggcctcgagggaaagctgaggtcctcagggagaagggcgcagtggtggaggggaggcttggaccgggggtgtctcagtatcccacggaaataacctagatgggcgcgatctggtaccagaaggtgggtggtcttgaataggggatctgtggcaggtcggagagagatccgtctcctggaggagaaagggtctaggatgcgcgggggctcaggagacaggccggggatgaaggcggcgtgcagggggtgcgcccgaggtctggggaaaagtctttgcgggaggccgggtcggcgactcccgagggctggtccggaatgggggcgcctgagggacgccgtgtagggggcagggagggagcaagcgtccccggcggcaaagggaggcggtctggggtccccaagtcctgcctcctcgcggggcagcgtcgcgccaagaggtccccgcgcctccggctcccagcggcaacggaaaagtctcaaaagtttttttcctcttctcccgaccagctcgtccctcctcccgctcctcctccccctcctccccgcagtggcgggggcggcggcggctcgtctcagactctggggcctcaggctgctcctcggcgactccttcctccgctccgggccgaggccggccccgcgggcggctcagagccgggggggtgccccggacggggcgtcccccctgcccccggccggggccctcgctgtctggctgctccgcggagggaggtgggagggagatggcccagggcgcgaagggcggcggcggcggggaccggctgggtcggcagggggttttgaagccgcccccggccccacccaggaagcgcacggggcgggagcgggggcggcccccagggggagggcatgggggggctgggccaccgtcctcatctcgcgtgggcgggctccgaggggggtcccttcagccctgggggaaagggggcgggcaccccggctccgccccgcaaacagggtgctgcctcctggcggccaagcgccaccaaagcgggtgatccagatgcgctgtggctttgcgggcggtgtgggtcaccagagaaagaggaccaggcggagaaggcttaatccgggggatgagacacaggggagccgaccagaggagggggacccagaacggaaggagagtcaggctgggaaacaaggtaggagaagagggtctgtcaacatgggggcctccggagggtgtcagtgggaggagggggcaacaggacacctgaaggatggaagggtcaggaggcagacacctgtaagaattgctctcctttactgagcacctcccatgtggctaagcagcctcctgtcactcaacaccctgcgaccccatacatttactgtccccaatttacagatagggaaactgggcccagagggaccccgaggtcctagaaaggacagaagcggtgccatgccttagctggggtcagctctgacagtctctagagtctgtgctcttgaccactgtgccatcctcccccatcactgggtgtccggggtgtggatggtggtgacgttggaggcagagtccctcagcactccacgccgtagcggtcgaagttgcggagcagcaggccgatctccaggtgcacggtgccaccagcagctgtgtgcaggcgatagcggtcggccccactgtagatggtgtccccatgcagcagctgcggcccaccacccacgaaagcccgtgccaactgttctcgccaactgcccaggggccgccacgtggggcaggccagctggtgggtgcccgggctactgggcacatggcaaaatccatagcctgcaagctggcagcggccaaagctgtcctgggaccacacctggaaatggagccggggccagcctgcaggaaaggagagagaggggaaaggagggatgggtggggaccagactcctgctgattccccactccctgatactcactggagaccccaggcccagtcttttcctctctgggtttctgtcccagagtttccaacccagcctcctttctaggctcccaccgtcttatctatccccacacagcagccaaagtgatctttccaaatccatgttactcccctgctaaggatccttccatagctccccagtgccctcagtataaagtccaacctcttcaacattcaaggcccttctaatcagacctctgctgaatttcctctctgtgttatcctcctccatgaccccatgtcagggcagcccattgctcctccagtccccaggtaaccatcatgggccttgtcagggacacctcctgccttccctcatgtccctgccctgctctctttgggcccagggccttctttcttgcccctctctaatccaccttccacctggcatctggaagcatctttctctccttccatagctttgcccatgtcctcagaacacagttcagctcctcagtctggtagtcaaagcccttggagatccagccccatctcatctcatgctgatcccttctcctgtgctagactctgttctagctagctggggacacggcagacatgaacatggatggcagacaaaaattcctgcccccgtgaagctgatatcctagacaacgaatgtagtaaataagcaaattatagggtagatcagatggtggtaattgctgtgagggaaaacagagctgggtagggtgagggtggggataccgctttagcaagaaggggatcaaggaagcttcattaagaaggtgacatttgagcaaatgctaaaaggaaggaagggagtaggccatgtggccatctagaggaagagtgctcctagccagagggaacagcaagtgccaaggccctggggggggactgtctggtggggacagtatggctggagcccagacggagtgtgcctggtggggacagcatggctagagcagaatgaggtggggagacgggaaggaggtgccagcctggttgtggagagccttgtgatgcatgctaagactatggctttcaccctgagtgagatggggaccattggagggttctgagcagagcagagatgggacctgacttaggtgttcacagggtcccagctgcatgtggggtgcagaccaggggggttggggaaggggactccagagacaagattcttgtcatagtccatgtgagagaagaacttggacagatcaaggtgctgggcgagaaaagggtaagaagtgggatttaggatgtatttcaaaagtagaggcagtttaagatttcctgatggacaaaatgggggcttgagaaaagagaaagcaaggctggtgccaccactgggggactggaggccccaagagctgaaaggttagagctgcccacctcacccacacagcaccggaaagattttttttttccccagctccagcttaaaagacagaaagattatttaaaagtgaaatctcagccaggcgcggtggctcatgcctgtaatcccagcactttgggaggccgaggcaggtggatcacctgaggtcaggagttcgagaccagcctgaccaccttggtgaaacgccatctctattaaaaaaaaaaaaggcaaaaattagccagatgtggtggcacgtggctgtagtcccagctactcgtgaggctgaggcaggagaattgcttgaacctgggaggcagaggttgcagtgagctgagatcttgccactacactccagcctgggcaacagagtgaaactctgtctccaaaaaaaaaaaggtgaaatctcacttgtccattacctgctctggctcccaagtgccttcaggagatggcctcagctcctcagcctggcactcaaggccctgcatggcctgtccccttctgcctttcccctctgccgtcccgctctccctcaatccactagatgcccttggctcactttcccctttgagtcttccacgtagctccctctgcctagaaccttcttctatccctctgccttattagctccgctggcccttcacagcaaagttcagaagccccctcctccaggaagccctctctgacctccctgacagagtcagccacttcctctgggctcccacagcctctccaaatcacctatcttagtcctgcccactctgaggtgccactgtctggagagaggtgtgtccccccataggacggtgaaccctgtgaggacaaggctaagggacactgccttgatcctcaatgtctccctggcatcacccaacacaggctggacacagggcaggtaccaggtagacgttctttatattggtgaaatatatggcacatttacctaggcaatttctcagaatcaactcatctccaggaacccacattttctactagaaaggctttctgatgccgctcctcccccagtactgatttcccctttgagcagcagctctactttcaagccgaggagcccttcctggagaaacagcccttgcctctctcagaccctgcctcccggcttcctctttattggagactctcgttttgtctctttacttgaatgccacctcccctcccaccctgaccccccaccttcccacctcctgctccaccctggcctctgccctaatcatacaaacttgggatcgcctattgagcaggcctgggaaggccttagctcagcctctccagggccagacttggctgcaaaagggacctacgtggtatggggagcagggacaggtcttggtgttcccagccccagggacctcagaggctactggccccctcccctcagcctggacccgggtccaggtgtgatacccaccttgaagacctttggtggcgaagtgcaggtcgatggggtgggaccagtaagccatgtcccctatctgcggggtgtccacttgcgtttggccctcccgcacgcctgacaggagcttccatgccgcccctgcagtgagagccgggacatagaggggtgggaggcagccatcgggaaggggatgccgctgtggctataggactgtttctctgtggcatctactggtaggggttacgaagcatggactctggaaccaagtatctgggttcaaatcctggcactacctcttcctgcctctgcaaccttgggcaagttagctttctctgccttggtctccccatctataaaatgagctgagtaataatgcattcctcattgtcttcatttgttttctgttactcttaacataatatccaaaactggataatttataaagaaaaggaatttctatctcacagttataggagactgaccaaggtggaggagccccatctagtaagagccttcttgctggaactcttcagagagtcccaaggctagtgtgctaacatgccactcacgtctctctctctcattttataaagccaccacttcctctcccatgataacccactaatccattaacccattaatccatgaatgggtaatgagcatagtgagcacgggataagtcttcaatatcattttattacgattctcaccccatattttcaagcctagtccaaggattaagatggggccaagggtaccctccaggagcgcatcctgaaacacacataacaatttcgatcctactgaggggtgataatgatagctaaaatgcactgagtggtaggatacagtggctcacacctgtaatctcagcactttgggaggccaaggcaggtagatcccttgagtccaggagttcaagaccagcctgaccaacatggcaaaaccccatctctacaaataatataaaaattaaggctgagcgcagtggctcacacctctaatcccagcactttaggaggcttaggggggggtggatcatctaaggtcaggagttcaagaccagcctggccaacatggcaaaacctcgtctctactaaaaatacaaaaattagtctggagtggtggcaggtgcctgtaatcccaggtactcgggaggctgaggcacgagaatcgctggaaaagctgcagtgagccgagattgcaccactgcactccagctggtgtgacacagtgagactccatctcaaaaaatgaacaaacaagccaggcgcagtgactcacgcctgtaatctcagcactttgggaggctgaggcgggctgatcacctgaggtcaggagtttgagaccagcccggccaacatggcgaaatcccatctctactaaaaatacaaaaattaggatgggcgcagtggctcacatctgtaatcctagcactttgggaagccaaggcaggtggatcacttgaggtcaggggttcgagaccagcctggccaaaatggtaaaactctgtctctactaaaaacacacacacacacacccacaaaattagccacgtctgtaatcccagcactttgggagactaaggcaggcagatcacaaggtcaagagatcgagaccatcctggccaacattctgaaaccctatctctactaaaaaaatacaaaaattagctgggtgtggtggcgcacgcccatagtcccagctactcaggaggctgaggcaggagaatcacttgaacccaggaggcggaggttgcagtgagccaagatggtcccattgcactccagcctgggcaacaagagcgaaattccatctaaaaaaaaaaagaaaagaaaaaaagaaaatgcaccgagtactaactaaatcccagatgctatgctaagtactttaagcatccattcatttaatccaccctctaggactcttaatcccctcctcaccccccagtttacagaccctccaccatggcccacgtggcctggctcttgctcccctccctgagttcatctcccatcactctccccctccctcatcaccctctggcctcactgtcccacttctgactccccacctcagggcctttgcactggctgttccctctgcctagaaagctctgctcctgggtgtccccatccctagcttttgttttcatccttcagggcccagctcaagtgccacttccacagaggggttctccctgaccctcttcaccaaacactagtccctgccacatcatttcttttcatcctagcacttaccactgtctggaatcacggtgctcctttctttttttgggggggtggggggagacaagatctccctctgtcacccaggctggagtgcagtggcacaatcacagctcactacaaccttgacctcccaggatcaagcaatcctcccacctcaacctcccaagtagttgggacgacaggcacacagcactatgctttgctaattttttatttatttgtagagacgggggtctcactatgttgcccaggctggtctcaaactcctgggctcaagtgatcctcctgctccagtctcccaaagtgctggcattacaggggtgagtcaccacacccaactgcactcgtttatctgtttatttattttattttatttatttttttttgagacagacttttgctcttgttgcccaagctggagtgcaatggcaccatctcggctcactgcaacctccgcctcctgggttcaagcgattctcctgcctcagcctctcgagtagctgggattacaggcacacgccgccatgcccagctaattttttttgtatttttagtagaaatggggttttaccatgttagccaggctggtctcaaactcctgacctcaggtgatctgcccgcctcggactcccaaagtgctgggattacaggcatgagccaccgcgcctggcctgcttatttattttctgtctcccctactgtatggcccaggaaaacagggaccttgcacactgctggatccccaagaccacaaacccagctcttggtatacagaaggtgctcaataaatgtttcttggacaaataagtgatcctaggaggtgggagctaatataatccccatttaacaggtaaagaaacaggctctgagaaggtgagttcatgaacatttattcagcacctgctatgtgccaagcactgttttccatgctggtgacatagcagtgactatagcagaccaaggtcccatcatgggactggattcagactcagctctaactgcagagcccaagcctttcatccaactgcctcagtattcttggctggatcaacatccccagcaactccctgaaataataaaaatcaggttagtcattactcccttctgggctgagttgagggaagcaccaggccctgcgtcaggctccttaaaagcaagatttcccaacagccctatgaagaacaaatgaggaaactgaggctccaagaggggacagcctctgcccagggtcacagagaaggtgagtggtccaacctggaaaccaagtctgactccagagcctgcccctcatccatcagctggagggttccgatttcctgggaatttcaacttccacctcacttacctgtagaatcaaaaaggacccaggggccaggcgcagtggctcacacctgtaatcccagcactttggaaggcctacgcaggcggatcacttaaggccaggagttcgagaccagcctggccgacatggtgaaaccccatctctactaaaaatacaaaaattagctgggtatggtagcgggtgcctgtagtcccagccactcgggaggctgacataggagaatcgcttgaacccaggaggcagagattgcagtgagccgagatcgtgccactgcactctagcttggctacagagtgagactctgtctcaaaaaaaaaagggccaggcgcagtggctcacgcctgtaatcccagcactttggaaggcctacgcaggcggatcacttaaggccaggagttcaagaccagcctggccgacatggtgaaaccccatctctactaaaaatacaaaaattagctgggtatggtagcgggtgcctgtagtcccagccactcgggaggctgacataggagaatcgcttgaacccaggaggcagagattgcagtgagccgagatcgtgccactgcactctagcttggctacagagtgagactctgtctcaaaaaaaaaaaaaaaaaaaaaagggccaggcgcagtggctcacgcctgtaatcccagcactttgggaggccgagatgggcagatcacaaggtcaggagatcgagaccatcctggctaacacagtgaaaccccatctctactaaaaatacaaaaaaaaaaaaaatagccgggcatggtggcgagcgcctgtagtcccagctatgcaggaggctgaggcaggagaatggcatgaacctggaaggctgagctagattgcaccactgcactacagcctgggaaacagaacgagtctcaaaaaaaaaaaaaaaaaaaaaaaagggactaggactcaggcctgaagacatgataatgccaaatggccacatctgtttcatagacattcatctgtgccacgcaacaacataccccaggctttacaaacaagaccccatcaaagtcttgtataagccaggcaaacactgaatgagcacttcctattccagccctattcctattctaagtgctgttgatactcgtttagtactcatgacaacttcaacaggtaaatatttctatgactctcattgtacaaacaaggaagtcgaggtgaagagaagtgcccaagttcacataatcagcccaagggtgccttaacaagcaataactggttttgaacccaggcagtctgtgctcttaacctcaaacctgtgctgcttcttagctactattagcttcactttgaaacaaggaaactgaggctcaaagtggtcgagtccaaaggtctccaattaataggtgggggagttaatatttaaatgcagatctggcagcccatgaccctaaccattacactataccatgactctatagggcctcagttggggaagcatgaacaaaattactttcctgggacgtggcggctcacgtttttaatcctagcactttgagaggctgaagtgggtggcctgtttgagcgcaggagttcgagaccagcctgggcaacatagcgagaccctgtctctacaaaaaataaaaaaaattagccagatttggtggtgcgtgtctgtagtcccagcttctcaggaggctgaggcgggaggatcactagagcccgagagttcgaggctgcactgagctatgatcacaccaccttactccagcccgggcgcagagagagaccctgtctgtatcccacccctcacacacacaaagatgggagcttgagactcatgtggacagggtgtgggctgggcctggagtactgagaactgatggaaatgaggttaagagtctgcgttaaggggtggaggaaggagcatgtagcctctaggctaggggtcttggtgtggaaatgaaccaggcttgggggaatacctgtgtgaatgccccacttgcagaagaggctactttccgagaaaccgctggcccctatgatctgcccgatcacgtgcacctcagccatggccctgggaggggaaaaatataatcacaaccctgtgaggtaagtgtattatctccatttgacgggggggaaactgaggcccagcaagtaaagggtagtactaggattccaagctagcttcgtcacacccctgaggctgaggtcttgaccacagatcctaattgccaacccatgaaagcctggaaaaaatggggggacccttgtctggggaaccagcatttaactctgggaagtccaaaataaccttttcgggttcaggtcggcggaaagccccgcccgaaggggctatggctccgcccacgagcgcaaaagacccgccttccgcgtcacgccagccaccccgcttccctcccccagcaagctccataaggcgcatgcgttatgagttcaggtccgacttaaccccgcctctaagcgcagcgcatgcgtcattcctaccttagcgcacttaacggttaggagaggagaaagcggcaaccggggttgtagttcatgggcttgactgcttcttttctccgcgggcgccgaccaggcctggctcgcgcctctcccaggacccgcctggctgcgagatatgtaagccgcgatacttccgcgaccgcgctcgtcttggtttccgtggttgttgctggggcaacagcaggctcctcccctagctttgtactcgctctgcgcgctactaattggtgctagccgtctgcggggggcggggtgaagctgtgatggacattttcctcctccgctccattttgggaaaatagcgtctctccagctacggcaaagggttccgccattttgggcgtggctaggaagctgccatgttgagtgtggctgaggaagtttgagtgcagtttctcccagataccttctttaccaaaaaagcaaatccctaactgctccgtgctgcgcctaccccaccgaagagctctctgtggtccgggatcacaaatcagagattgaaccaggaccaagggggaattccttccaggacctcgtgtacatccccggccttgtaactggaaaacaaagcaaaaaaatcactcctcattcagagagtggagaagttggggagtgggttctgcttccgttttagagttcccctaggtttctcaaggacaaggaaggaaggaagttggataagtccaacttccttctcggagctactaccaagttcactgttactgcttgattctgagcaaggagcggttggggtagcgaagagaaatgaggaactaagattcccttatttgcagaaaatcctctttcctattgattgatttatcaatcaagaaatggagatgttgtccctggatgccatcctagatgccatcatttcccacatcaagccagtcatcaggtcccatcaaggctccttaaaagggtctcactctgtcacccaggctggagtacggtggctcgatcacagctcattgcagcctcttaactcctgggttcaagggatcctcctacctcagcctcccatgtagctggtatcacagacatgcaccaccacggctggctaattcttttttttttttttaagagatggagtcctgctatgttgctatgttgcccagtcttgtcttgacctcctgggctctagctatcctcccagttctccctcccaaactgccgggattacaggcgtgagccacccagccaggccaatagatacaaagtatttacaagctaccattggctaggcgcggtggctcataactgtaatcccagccctttggaaggctgaggcgggaagagctcttgaggccagaagttcgaatatagggagaccccattaataatgcatatatcaactagtgaagtattccattgaattgtttaatataaatgttatcctattgaaatgttgtaccctcgttataattttggttttttactttttgagatggcgtctccccctgtcatccaggctggagtgcagtggtgcgatcccagctcactgcaatctctgcctcccgggttcaagagattctcctgcctcagcctcccgagtagctgggactacaggcgtgcaccaccacacccagctaatttttgtatttttagtagagacgggttttcaccatattggccagaccggtctcaaactcctgacctcaggtggtccacccgcctcagcctcccaaagtgctgggattacaggcgttagccaccgtgaccggccgggtttttttttttttttttttttttgacagagtctccctctgtcgcccaggctggagtgcagtggcatgatctctgctcaccacaacctccgcctcccaggttcaagcaattcttctgtctcagcctccttagtagctgggattgcaggcacccaccactatatctagctaatgtttgtgcttttagtagagatggagttccaccatgttggtcaggctggtctcgaactcctggcctcatgtgatccttctgcctcagcctcccaaagtgctgggattacaggcatgagccacctcgcctgggcccagctactttttgtattttcttttttattttatttatttacttttttttttttttttttttgagacagaatcttgctctgttgcccaggctggagtgagcctctgcacctggcagaggtttcacttttaaatgatctttctgtcctttaagctggagctggggaaaatgtatttatttatttatttatttctggatgctgtgtgggtgaggtagacagctctaacctttcagctcttggggcccctggtcccctagtggtggcaccagccttgcattctcttttctcaagcccccattttgtccatcaggaaatcttactgcctctacttttgaaatacaccctaaatcccacttctcacctctttgtcgccctgcaccttgatctgtccaagttcatctatcacctggactatgacagggaccttgtctctggggtcccctttgccaacccctctagtttgcaccccacatgcagctggaaccctgtgaacacctaagtcaggtcccatctgctcagacccgtccagtggtccccatttcactcagggtaaaagccaaagtcttatcatgcatgacaaggctctccacaacctggctggcacctcctgcctcatttttgtatttttagtagagacggggtttcgccatgttggccaggcaggtctcaaactcctgacctcaggtgatctgcccaccttggcctcccaaagtgctgagattacaggcatgagccactgctcccggctgaggtcttcattctgaaggctcccatgtatacatgttaaataaaagaaaataaattatcgtcaactataaataatgagattcagaaaatatgattgaggccggattcggtggttcatgcccgtaatcccagcactttgggaggccaaggagagtggataccctgaggtcaggagttcgagaccagcctggccaacatatagcgaaaccctgtctctactaaaaaataccaaaactagatgggtgtggtggcacatgcctgtggtgtcagctatttgggaagctgaggcaggagcatcacttgaacctgggaggcagcagttgcagtgagccgagatcacgccaccgcacttcagcctgggcgacagagccagacttctactctcaaaaaagaaaaaaaagaaaagaaaggaaaatatgattaactatagagtttattccaggctacaggaccagtacatatgttacaacagtttcattagtacatcttgctatgctgcagggaagattgcgttaacattctgataggaggaggagtactctttctttctttctttctcctttcttttttcttgagataagatcttgctctggggctgggcgcggtggctcacgcctgtaatcccagcactttgggaggttgaggcgggcaaatcacgaggtcaggggttcaagaccagcctggccaacatgatgaaacctcgtgtctactaaaaatacaaaaattagctgggcatggcggcgggcgcctgtaatcccaagtactcgggaggctgaggcaggagaatcacttgaacctgggaggcggaggttgcagtgatctgagatcgtgccattgcactccatcctgggggacaagagtgagacaaagtctcaaaaacaaaacaaaacaacaacaaacagatcttgctctgttacccaggctggagtgcagtggcacaatcacagctcactgcagcctcgaacgcccaggctcaagcctcctgcctaagcctccccagtagctgggactacaggcgtgtgccaccatgcccagctaatttttcaataattttttctgtagagacatggtctcactctgttgcccaggcttgtctcaaactcctgggctcaagtgatccacctctgcctcccaaagtgctggggttacagatgtgaggccacaacacccggcctaggagtaatgttctgaggtgatcttatctctggcactgcttggtcattcttaatcatttacaggaaaaagcagaagttgtaactgcatgctacgtgactcaggctacatagcaacattcctctcaaggcttggaataatttaaagttccaacagctttaagtttgaattatctaaccacattatcgaaagttggccaggcctggtggttcatggctgtctgtaatcccagcacattgagaggccacagcaacaggatcacttgaggccaggagttctggaccagactaggcaacgtagtgagaccctcatttctacgaaaacgtttaaaaaaaaaatagcagggcatggtgacacatgtctgcagtcccatctacttaggaggctgaggcaggaggatcccttgagcccaggagtttgaggctgcagtgagctgtgatcatgccaaggtacttcagcctgggtgacagagtgaaaacctgtcaccttttttttggggggggtggttattgggtttttttgagacagagtctcgttctgtgggccagggctcacagcaacttctgcctcccaggctcaagcaattctcctgcctcagcctcccaagtagctgggattacaggcatgtgccaccacacccgggtaatttttgtatttttagtagagacggggtttcaccatgttggccaggctggtcttgaactcctgacctcaagtgatccacctgactcagcctcccaaagtgctgggattacaggtgtgagccactgtgcccggcctgaagctgttttaaaatatatccacaaatgcttgggcagccccctttcagtaagtggagcctaattctccttcccttcagtatggctagtttttgtaatttgcttctaaccaatagaatatggggctgggcacagtggctcacacctgtaatcccagcactttgtgaggccaaggcgggcagattgcttgaatccaggagtttgagagcagcctggacaacatgatgaaaccccatcactacaaaaaatacaaaaaattagctgggtgtggtggcatgcccctgtagtcccagctactctggtggcggaggtgggaggatcgcttaggttgagagttggaggctacagtgagctgtgattgtgccactgcactccagcctgggcaactgagtgagaccctgtctcaaaaacaaaatgcttttaagccaagtatggcacacagccggcggtcccggctacttcatttttgttgttgttgttgttttgagacagagtttcactcttgttgcccaggctggagtgcaatggtgtgatctctcctcaccacaacctctgcctcctgggttcaagtgattctcctgcctcagcctcccaagtagctgggattgaaggcacctgccgccacgcccagctaattagtagagatggggttttgccatgtatggccgcgcctggccatcccggctactttggaggctgaagccggaggatgccttgagtgcaggaagtccaggctgcagtgagctatgatggcaccctgcactccagcctgggcaacaaagtaagactgcacctctaaaaaaaaaaaaaaaaggcccggtgcagtggctcatgcctggattcccagcactttgggaggccgaggcaggcagatcacttgaggtcaggagttcgagacaagcctggccaacatggtgaaaccccatccctcctaaaactacaaaaaaaatcagctgaacgtggtggcgagcgcctgtagtcccagctactcgggaggctgaggcacgagaatcacttgaacccaggaggtggaggttgcagtgagccgagattgcaccattgcactccagcctgggtgacagagcgagactctgtctcaaaataaataaataaaaataaataaataagccttttaattgtggtaaaatacacatttaccatcttaactgtttaaaactgtattgttcaatagtgttaagtacatttacattgtgcaaccaatctccacaaccattttcatgttgcaaaactaaaatttttgcaaagtaaacacatttttgaaacaaaacaactcccctattcccccctcttctgcagctcctggtaatcaccatcctattttctttcaatgtatttattttactttatttatttatttattttttgagatggagtttcactcttgctgcccatgctggagtgcaatggcatgatctcagctcaacgcaacctctgcctcccaggttcaagtgattctcccacctcagcctcccgagtaactggtattacaggcatgcaccaccatgcctggctaattttgtatttttagtagagacggggtttctccatgttggtcagactggtctcgaactcctgacctcaggtgatctgcctgcttcggcctctcaaagtgctaggattataggcgtgagccactgtgccccacctatttatttatttttattttatttatttatttatttatttatttatttgagacagagtcttgctctgttgcccaggctggagtgcagtggcaccgtgtcagctcactgcaacctccgccttccgggtttaaccgattctcctgcttcagcctcctgagcagctgggactacaggcgtgtgccaccttgtccagctaatttttgtatttttagtagagacggggtttcaccatattggccacgctggtctcgaactcctgaccttgtgatccacccgcctcggcctcccaaagtgctgggattacaagcgtgagccaccgtgcctggccacctatttatttttttgagaggaagtctcattgtgttgcctaggctgtggtgtagcaacgtgatctctgttcactgtaacctctgcctcctggcttcaagggattctcctgcctcagcctcccaagtagctgggattacaggcatgtgtcaccacgcctggctaatttttgtatttttagtagagacagggtttcaccatgttggccaggatgtactcgaactcctgacctcaggtgatcagcccgcctcggcctcctaaagtgctgggattacaggcgtgagctaccgtgtctggcctgttttttattttttttgagacagggtctcgctctgtcacccaggctggagtgttctggtgagatctcagctcaccacaacctctgcctcccaggttcaagcaattattgtgcctcagcctcccgagtagctgggattacaggcatgcaccatcatgcccggctgacttttgtatttttagtagagacggagttttgccatgttggccaggctgatttcgaactcctgacctcaggtgatctgcccgccttggcctcccaaagtactgggattacaggtgtgaaccaccatgcctggcccactatcctctccttccttccttccttccttccttccttccttccttccttccttccttccttccttctttccttccttccttctttccttcctccctccctccctcctttctctctctctctttctctctctctttctttctttctgttgctctgtctccaggctggagtgcagtggcacaatcttggctcactgcaacctccacctcctgggttccagtgattctcctgcctcagcctcccgagtagctgggactacaggcgcacaccaccaagtccagctagtttttgtatttttagtagagatggggtttcaccatgttggccaggatgatctcgatctcttgacctcgtgatcggcctgcctcagcctcccaaagtgctgagatcacacgtatgagccactgcacccggccactatcttattttctgtctctgtgaatgtgactactctaagtacgtcatgtaagtggaatcctacagtatttgtcctcttatgacaggattatttcacttagcatagtgtcctcaagggtcatccaggtcatagcatgcaacaggatttttttccttcctgacccccctttttttgacttggagtcttgctctgtcactcagactatagtgcagtggctatcacagccactcctggactcaagtgatcctcccacctcagcctcccaagtagctaggactacaggtgtgtgccaccgtgctcggctaatttttttttaagttttggagagagagggtggtctcagtggctcccgcctgtaatcacagcactttgggaggctgaggcagtagggggcgggggtggggatcacttgagggtaggagttcgagaccagcctgggcaacagggtgaaaacctgtgtctactaaaaatataaaaattagctgggcatggttgtgcgtgcctgtaatcccagctactcggaggctgaggtaggagaatcacttgaacctgggaggcagaatttgcagtgagctgacattgcgccactgcactccagtctgggcaacagagtgagacttcctttaaaaaaaaaaagttttgggagagatgggggtcttactgtgttgcccaggctggcctggaactcctgggctcaggcaatcctcctgcttcagcctctgggattacaggcatgggattacagtgctgggattacaggcatgagccactgtacctggccagcactttattttattgttatttattattattactttgttttttcataacattgatgttttgaaggttataggcgacctcctttgtagagtgtccctcattttggctttgtctcatgtttcttattattagatttaagttatgcattttggcaggaaaaccaaagaaatggtatgtgtctccctctttgcttcagaccagaggcaactaaggtcaatttgtcctgttaatggtgatattaacttgtatcatctggttaacgtgatgtttgccaattttctccattaatttttttttgttataataagtaatctaggggaagctactttgagactaaataaatatcctgttctttatcaaatcagattttcacccaataacttaatagtttcagtctctgttgacaatccttgctggaatctcgtgatcttttgtttttgtttttgtttttgtttttgagactgggtttcactttgttgcccaggctggactgcagtggcacaatcatggctcactgcaacctccacctcctgggctaaaccaatcctcctatctcagtttcccgagtagcttggaccacagacatgcatcaccacacccagctgattttgtttattttttgtagagacaaaatttcactttgttgccctggctggtcttgaacttttgggtttaagtaatcctcccaccttggcctcccaaagtgctgggattacaggcttgagccaccgtacccagctggaatctcatgtttaatattccagacctgtcacaaacactaagaggtgtagcctcttagactgtacaaggctaacggcagccagagagctctcactggaagtgaattaatctctaggatggcctagagggatgaggggacccacagagctcaatgatttggtgaaaaactgaggctggaggctgatgggaatttatgcccccatcccacacatatgtaataaagacccactttgtgccaggcactgttttaggccgtgaggcacagtagtgaaaaaacgagatcaaatctcagcccttgttgtgccgacactgatgtgggaggattcaaactacaaacaagaaaaatacatggtatgtttaaggccgggtgcagtggctcacgcctataatcccagcactttgggaggccaaggcgggcagatcacttgaggtcaggagtttgagaccagcctgggcaacatggtgaaactccgtctctactaaaagtacaaaaattagctgggcatggtggcaggttcctataatcccagctacttgggaggctgaggtgggagaatggcttgaacccaggagatggaggttgcagtgacctgagatcgtgccactgcactccagccttgctgactggggttttgctatgtcgcccaggctggtttcgaactcctaggctcaagcagtcctccctcctcggcctcccaaagggctgggattacaggcgtgggccaccgcacctggcctacagtatgcttcatagaaatatgaaaagaatgagagcaaggttgagatagaaagtaacagggcatccctcctgagtaaaacaatcctgccccctcacgctctcgtctaccctcccgtgggtctccctgcttctgtcgtctgccagaaactggctgagccaagtgcacttgcagacgccatctgttctccctgggagtggggccggtgccagcgccagcatctggactcttggcaaggagccctggagccctggagcgagggaactccggccccacaaaggccagggaatcctccagtctggtgagacggagggcttctgggaagggaggcctatacaaggctccatgaaggaggtggaagcttgcaagacgatgatagtcttgtaatcagtccgatggagatggatgtaaataataatattaataaacaccatcaaatgtgttcagagtgctttctttgccaggctttggataaatgttggatatctgttctttttattttttatttttctatttcctaggcagcacctaaaccaaaataggttcagagaggctcccaatgttggacatttgttgttgcagcaactctaagtactctacatatgttatcacataagaggcaaggagcattatccccattttgtaggtgaagaaataggggttcagagaggtgaaggcattgtctagaggccacacactcagtgacttaaagagcctggaaaggggccaggaatggtggctcacacctgtaatcccagcactttgggaggctgaggcgggtgggtcacctgaggtcgggagttcaagaccagcctgactcatatggagaaaccccatctctaccaaaaatacaaaattagccaggtgtgatggcgcattcctgtaatcctaactactcgggaggctgaggcaggagaatcgcttgaacctgggaggcggaggttgcggtgagccgagatcacgccattgccctccagcctgggcaacaagagtgaaactccatctcaaacaaacaaacaaagagcctggaaaggaaaccaggtctatgtgggtccaaatgctgactcatgaacatcactgtaccacgtgacaatcagagcatcaccccctactggaccccactcctcagccttctttccctagaaactcctaacccacctgcctctgcttcctcctcacccattggcttagcaagggccacaggaacacagcccggggttacaatatgctgggcttggtaccagctgtttactgtggccaagtgagcatgcaagtgagcccgtttattttcttttctttttttttttttttttttttttttgagacggagtcttgctgtttcccaggctggagtgcagtggcgcgatctcggctcactgcaagctccgcctcccgggtccacgccattctcctgcctcagcctcccaagtagctgggactacaagcgcccgccaccaagcccggctaattttttgtatttttagtagagacagggtttcaccgtgtcagccaggatggtctggatctcctgacctcgtgatccgcccgcctcggcctcccaaagtgttgggattacaggcgtgagccactgcgcccggcccgtgagcccgtttctttatctgcaaaacagggattaaaaacaagccaacaccccttcagcactcctccgcaaaaaaacaccccaaaacaaaataggccaggcgcggtgactcacacctgtaatcccaccgctttgggaggccgaggctgcagtgaacccaggagtctgaggctgaagcgagcaatgattgcgccactgccttccagcctgggcgatcagagcaagaccccgtcttttaaaaaataataataaaaaaaaaatctgccgggcgcggtggctcacgcctgtaatcctaacactttgggaggctgaggcgggcagatcacctgaggtcaggagttcaagaccaacctgaccaacacagcgaaatctcatctactaaaaatacaaaaattagctgggcgtggtggcttgcccctgtaatcccagctactcgggaggctgaggcaggagaatcgcttgaacccgggaagcggaggttgcggtgagccgagatcactccactgcactctagcctgggcgacagagcaagactccgtctcaaaaacaaaacaaaacaaacaaaaaaaccaaagtaaaatagcagcgacaacaacaacaacaacaagaaaaacccggagctgagaggaagaatgaatgcgatgatgaatgtaaagcgtttaacacagggcttgggtacagtctgccctcaatgaaccaatgatgtacccctaggcaatttacctaacctcggcttgccagtttcctcccgcgtgaaacaggacaataaacgattatgcctcttagggttgtgctgaggaatacatgtgtatgtaagtttatttgcaaagcacttagaacagggcgcacggtccttgttgctgttattattattggctattattgcgcaaaggggaagggaggcggggccaagccaggaaggccctggagaatccggggtgccccctcctccggcagagcttgggcctgggctcacgaggaaggggctgcagttctccaaggattcccgcctgctcccagacccccgggagtcgtaggaacccgttcctggacgctgacgtcggctttcagggatccctcgccggacgccgcggagggacagagcctgggaagccgtcgccccgccccgtccccgcccccgcgcgcagcgggcccggggcgctgagacccgcgtagagcaaagcgcaaggtcccagcgccccttggatcctcggtggcagggtccgggcaagtgtcattgcgagggttcaggaagccccggcctgtgatcgtgagcggtgagtgagggacgtaggtgggtgggggtcacagtcccttccctgggtcctggagttggggatgagagggcaaagctttggcgaggaaatcggctcagtcaaggtttggaatgagcaggcaggaggcttggggaccttccagggggatcgtaggacgagaagaagaatattctttctggttgtgttgcgtgtgtacgtgtatgtgtgtgctggggttgagggtgtttatgggggcgaggtgtgcaaaggattctggagagctggtgcatgtgtgggagttgtgtggagtcataggtgtgtgggtggagtagggcaggggtgcctgggcctgatgagtggggcaggcatgccagaggtcatgagaataggagagagtgccggggtgcatgtgtgcgtgtgtgcacaggtgtctgtggtttgtgatgcagtggggagtagggttgtgcacggagtcaattgggataaatgtgtaagaaggttggggacctgaaaggggtgttttctgggagctgatgttttggggcaaatattcaaggagtcctttgggagatgaatgtgtggaggtggaggctgggcttgcctagatggggctgtgtggcaggggacttcggggggcaggtctaggggacagaggatggggaatgtagactagagtgcagttccaggcagcactgggggtaggggatgggtgtgtgtgtgactgggaggggtgcctgggcctggataggtggtcacgcggtatgaacctgggatggatattgggggtgtttgtggggcaggtaagtgtgtaaggcatggtgcaacaggtgctgcaacttattggggtaagtgtgatgggtatgtggcttttgcctgagagaaatgcccagaatttggctgggtgcggtggctcacgcctgtaatcccagcactttgggaggccaaggctggtggatcccctaaggtcaggagttcgggaccagcctggttaacacagtgaaaccctatctttactaaaaatacaaaaaaaaaaattagccgggcatggtggtgggcgcctgtaatcccagctactcgggaggctgaggcagaatggtttgaacccgggaggtggaggctgcagtgtgctgagatcatgccactgcactctagcggatctgcagtggtggatctgcctgggcaacagatggagactttgtctcaaaaaaaaaaaaaaaaaagagagagagagagaaatgcccaaaattgaatgtccagacccctgagttctcttcataacctgaggccaatctttttttctctctgggcctcagcttctgtatctgtaaaatgggtctgaggaccactgcactaactagtctctgcctgagtctctctaaagcaaggggtcagaggttgagtgaagtgagacttttacaacttgtctttttcttccccctacccctaggaaacccctcctggagtttccccaaagccatggacagccctagtcttcgtgagcttcaacagcctctgctggagggcacagaatgtgagacccctgcccagaagcctggcaggcatgagctggggtcccccttaagagagatagcctttgccgagtccctgaggggtttgcagttcctgtcaccgcctcttccctccgtgagcgctggcctgggggaaccaaggccccctgatgttgaggtaggaaacagcaggccttagtggaaggcacgggagggggctggggtgagccccactaaggccagcatctggcaggttgacagctgtgccgatctgccttaggcctggagtctcacttcccagctgtgtgtgggcttctgagatttccagttacggttcttcttgttttatgtctctcatctttgttgcctggcttttggctctgtcttccctctgatctcagactccgctggttggtgtcttcagagtgcatgcacctctggcttttgtccaccctgctgtctccctctttgtgtgtgtgtgtgagagagagagagagagagagagagagagacagggtctcgctctgttgcccaggctggagtgcagtggagcgatcatagtttactgcaaccttgacctcccgggcttaagcaatcctcccacctcagcctcctgagtagctgggaccacaggcatgtgccaccatgcctggctaattttttggtgttttttgtagagaagaggttttgtcatgttgcccaggctggtctcaaactcctgagctcaagcaatctgcctgtcttggcctcccaaagtgctaggattaaaggtgtgagccaccatgcccagccttccttttttttttttttttttttttttaagttactgttgtcactttttataatttctcattccaggccaggcacagtggctcacactggtaatcccagcactttgagaaggcgaggcaggaggactgcctcgcccaggagttctaggctagcctgggcaacttagtgagactccatctttatttttatttaatttttcattttgtcctccgaaaattagaaagaccccatcttaaaaaaaaaaaaaaaaattagccaggtgtgatggcgtgttcctgtagtaccagctacttgggaggctgaggtgggaggatcgcttgagcccaggctgcaatgagctgtgatcataccaccttactccagcctggacaacagagcaagacagacagaaagaaagaaaaagagagggagaggggggagagagagagagagagaaagagagagggagggagggaggaaggaaagaaagaaaagagagagagaaagagagaaagaaggaaggaagaaagaaggaatgaaggaaacaaggaaaggaaggagggaaggaaggaaggagaaagcagaaagaaaggaaggcaggcaggcaacaatcatgatgaactcttacggtttctgttggtcaggaatttgggacttagttgcatggttctgcctctggatctttcttgaggttgcattcagctggtgggtggaactagaacagtcaggggctggctgggcacttttctctctcttcatggtgtcttagggcttcctttttttttttttttttttttttgagatggagtttcacccttgttgcccaggctggagtacaatggtgcaatctcagctcactgcaacctccgcctcctgggttcaagcaaattcccctgcctcagcctcctgagtagctggatttacaggcatgtgtcaccatgcccagctaattttgtatttttagtagagacagggtttcactatgttggtcaggttggtctcaaactcctgacctcaggtgatccacccacctcagcctcccagagtgccagattacaggcgtgagccaccgtgcccagccgagtcttagggcttctatgtggtctctccatgtttgctgccttgggattccttacagcataacggcttcagggcagtcaggcagcttatgtacctccagcctacagcatgaatattgcagcaaagcagaagctgcctcaccttttctgatttcgctttggaagtcacgtaacatgacttccaccacattctattaattacaagtgagtcatgagcctgctcaaattcaaggggaggggacacagaactcatcccttgatgggaaggatatcaaagtcacatggtaagaaaagcatgtggggccgggcgctgtggctcatgcctgtaatcccagcactttgggaggccaagacaagttaattgcttgaggtcaggagttcaagaccagcctgaccaatgtagggaaagcccgtctctactaaaaatacaaaaattaggccaggcgcggtggctcacgcctgtaatcccagcactttgggaggctgagacgggcggatcacgaggtcaggagttcgagaccagcctggccaacatggtgaaacccagtttctactaaagaaaaaatacaaaaattagccaggtgtagtggtgcacacctgtaatcccagctattcgggaggctgaggcaggagaatcacttaaacctgggaggcggaggttgcagtgagccgagatcacgccattgcactccagcctgggcaacagagtgaaactctgtctcaaaaaaaaaaaaaaaaaaaaaaattagctggccgtggtggtgggtgcctgtaatccccgcttttgggaggctgaggcaggagaattgcttgaacttgggagatggaggttgcagtgagctgagattgagccactgccctccagcctgggcaagactctgtctcaaaaaaaaaaaaaaaaaaaaaaaaagcttaaaaatctaaactctagagttttcagcaggcaggtttgccctaatcatttaggccactggagcattttataatctccatcttttatttatttatttattagtgacagggtcttcttgctccgttgctcaggctggggggcagacatgtgatcatagctcactggagtctcaaactgctgggctcaagccatcctcctgcctcagcctcccaaagtagctgagactacaggcacaagacaccatgcctagctaattttttttttttttttttttgagatggagtctcactctgtcgcccaggctggagggcagtagcgcaatctcggctcactgcaagctctgcctcccgggttcatgccattcttctgcctcagcctccagagtagctgggactacaggtgtgtgccaccacacccggctaattttgtttttgtatttttagtagagacgaggtttcactgtgttagccaggacggtctcgatctcctgacctcatgatccgcctgccttggcctcccaaagtgctgggcttacaggcgtgagccactgagcctggcccatgcctagctaattttaaatttttttttgtagagatggggtcttgctgtattgcccaggctggtctcaaactcctggcttcaaatgatcctcccgccttggcctccctaagtgttgggatgacaggtgtgagccactgtgcccggccaataatctccatctttttgcaggttccttgtttcagtggtgtttgtccctgctcaggggcttttctttttttgagatggagtctcactctattgcccaggctggagtgctgtggctcgatctcagctcactgcaacctccacatcctgggttcaagtgattctcctgcctcaacctcctaagtagctgggattacaggggcataccaccacgcctggctaatttttgtatttttagtggagatgaggtttcaccatgttggccaggctggtctcccaactctcgacctcaggtgatccacccacctcggtctcccaaagtgctgggattacaggtgcaagctaccacgcccggccatgcgggggcttttcactcagagattgtaagcaattgtagcgtccatgattggatccgtcaaccccttgaaaatgaactgaaaactctgggtgtgggtggggctcttctctggagacctgatccacaacttcccttcaaagggctccaggatacaaatgtcaaaagcccatctctggccaggtgtggtggctcatgcctgtaatcctggcactttgggaggccaagacgggtggatcacctgaggtcaggagttcaagaccatcctggccaacatggtgaaaccccatctctactaaaaatacaaaattagccaggtgtgatggcgtgtgcctgtaatcccagctactcgggaagctgaggcaggagaatcatttgaacccgggaggcagtgagccgagactgtgccattgtaccccagcctgggtgacagagcaaaactccgtctcaaacaaacaccgaaagcccatctctgaacacttttttctctttgtatctctggggaagccctaggggcaggtattggcctttgagggctatggagagcagagcaatggggcaggaaaggtggatggagatgcccacctgggcactttcctgtccgtaggacatgtcatccagtgacagtgactcggactgggatggaggcagccgtctttcaccatttctaccccacgaccacctcggcttggctgtcttctccatgctgtgttgtttctggcccgttggcatcgctgccttctgtctagcccagaaggtcagtctgtgtgtgggacttggaggggactgggcataaaagagaaaaatgcaccacaaaaacaaagagccatatacctgaggcgggaaggtggaaggtagcccagagaacctgaactcaaatcctgagtctgccactctctgcaagattttttttgagtctcactttgtcgcccaggctggagtgcagtggtacaatctcggctcactgcaatctctgcctcttgggttcaagtgattctcctgccccagcctcctgagtagctgggattagaggcgcgcgctaccatgcctggctaatttttgaatttttaataaagacggggtttcaccacgttggccacgctggtctcgaactcctgacctcaagtgatcctcccatcttggcctcccaaagtgctgggattacaggcgtgagccacggtgcccagctctctgcaagattttgggcaagtcacttaacttccctgtgcctcactttcctcatctgtaaagtgggaataattgctacctctgggtcaatgtgagaatcaaatgagttagaatagtggcatataccattttaatgtttttatttattttttaaaatttattattattattattttttaccattttaatgtttttattaaccactcagcatccccagtgcctgacctatagtaggtgctacgtatctgcttttggaatacatgcatgaatgaatgaatgggtatgttgggtgggggagggaccaggggaagggtctgggactgaggggatgcctgggtcactgctgcccactgcctctacagaccaacaaggcttgggccaagggggacatccagggggcaggggccgcctcccgccgtgccttcctgctgggggtcctcgccgtcgggctgggcgtgtgcacgtatgcggctgccctggtgaccctggctgcctaccttgcctcccgagacccgccctagttgcccctacagccctcactgtgaaccctgaggccggcagcccagcaaatctgtgggcagagagtggagaatcttggtggatgaggctgcggcggcggcaggagcatctagaaacgggagcgagctggactggaacccttccccttcctggccaccgctcttcgggcggcagcaacctgagattaaacaccagacacccttgcagccaaaccagagtctgttcgcgtgtgtgggaggatggaagggggtgggggtgcttgagaccaacaggggactgactggtcagggtgacgggctgtggtgggcatccccagggtgcttgctccctgagacctgagctggaaaagggggaagaggattttcgggttttttttgttttttgagagatggtctccctgttgcccatgctggagtgctgtggcacaatcatggctcactgcagccttgaactcctgggctcaagcaatcatcctgattgagcccaggagcctcccaagtagccgggactacgggcacctgccaccacacccagctaattaaaaaaatttttttgtaaagacaaggtatcactatattgcccaggctggtctgaaactcctgggctcaactgatcttcccgcctcggtctcccaaagagctgagattacaggcatgagcgaccatgcctggtggtttctaaacagcaggatgttctcatcccaatatgggtggttagcagagaactggagagagctgagtttcaagtccttactcctctacctgttagctgtgtaagcttggcccaagtgacttctcactttttctcctctgcaaaatgggactttctgcacacctcaggctgtagtgaggattaaatgcatcatatgtggaaatgactgtctgctgttgctgtctccctctgagcttttttttcttttcttttcttttttttgagataggatctccctctgtcaacccagactggagtgcagtggcccgatcttggttcactgcagcctcgaccttccaggctcaagtgatcctcccacctcagcctcccaaggagctgggaccacaggcgtgtgccacaatgcctggctaattttttgtatttttttttttttttttgagatggagtctcgctctgttgccaggctggagtgcaatggtgcaatctcaactcactgcagcctctgccttccaggttcaagagattctcctgcctcagcctcctgagtagctgggatttcaggtgcgcagcactgcgcctggctgatttttgtatttttagtagagacaggttttcaccatgttggtcaggttggtctcgaactcctgacgtcaggtgatccacccacctcagcctcccaaagtgctgggattacaggcgtgagccaccaagcctggtctttattgcttgataatgtctagcccctcttagtgtgcttagtgagcacttcctatgtgcctctgctaagtgcttgtgacagatgtgttttccctgtccaggtgccaacacctccatgtttccttaaggatgcatccctttccctattgcaggccatttggtttggatgggactgcctccaactgcaggtagggttttgccccatctctactaaaaatacaaaaattaggctgggcacagtggctcaagtctgtaattccagcactttgggtggccaaggcaggcgaatcacctgaggtcaggatttccagaccagcctggccaacatggtgaaaccgcatctctactaaaaatacaacaattaggccaggtgcggtggctcacgcctgtaatcccagcactttgggaggcagaggtgggcggatcacctgaggtcaggagttaagagaccagcctgaccaacatggagaaatcccgtctctactaaaaatacaaaaattagctgggtgtggtggcatgtgcctgtagtcccagctactcaggaggctgaggcaggagaatcattggaacccaggaggcggaggttgcatcaccccattgcactccagcctgggcaacagagcgagattccgtctcaaaacaaaagaaaacaaaacaaaacaaaacaaaacaagacagggactataacaacagccccatctcacagggttggtgggtgggtatttagagtttcctccccatggcctacaaggccccacctgcatgcttgcccgtttcccccagccccatctgctctcctgctctagctcgctggctttggccaccctgttcaccaagctggtccccagcccctgggggctccttccccacattatccaagagctcactccctttcctctttcagggtcccctctgaggtaccctgctctgtgaaggcactgatgcctgatgtactcaatttgccctccataaagggactctcccaaactcctgttccctgctttttactttttcatagatttactaccatctgacaaattccagtttacctccctgctcctctgggatctcactagcagggcctgcacacgatgggtgctcaacagacatttgttaaagtgaattaatttattgattcatccattccataaatgtgagctcctttgaatgttatccttgctggggggatctgtgcccccaggcctgggggctgtcacaggccaaggcctccccacaggagccctgtggttacagagctgcaggctcaaggagcccatgggtcagagaggcaaggctgggctgctggtttgcttcaggctgtagggggtgagtgggtggaggcaatgggagcggccccttgccccagcttgcctcagctcttggagtaacgcctctgcagcgattcccggtagaaacggaagacgtgttgcgaagcggcctgggccgcagccaggcactgctggagctgcgggggagagactggtcggtgctgggggccgagcccttcatgcacacacgacttggctgacccaggaggttctgctgaccccacctgactcccttaacctcccatcactcccctgcccccaagtgaggcaagtggtaagggattatttcccatttcatgaactgtttcttagagatcaggagaaataaaaagagggagaaggacttcaggatcagattctgacagcaacaggactcagacctatcaggcatcctcacaccttggaggaggccccagctgtgcagagctatggaactggagagtgcacagaattggagtggtcttgggattttacagccacagtccccttcagcccaaataatctaagagccatggaatcaagagactcccagtcttcactgccatgtattcctagattcatgaggtccaggttggacatgcttttgcagacagtcatgtccaagagtttccaggctctgccccttagcctgagacctggaattcccatggctcaccactctgagctgggagctgggggaccatcacatgccctcttctgacttcaaactgagctcatcctctttttgcctgtgttataaattgggcttcccttaaacatttccgcaaaggtttctgggtccacaaagtttgaaaactccctttttacaagaagaaatttaagaggctctcctgaagcctctcagaatccagggcagagttgggacaagaccgtatgtcagtgggaaggaaggttctggcttttcccctcatccccatgctggtacctcagtgtctgagtagagccccttggtgctggacatcagcagcttccgttccacgctgtccagggcaaaggtcaggactgcccgggcctcctagggacaaggggtagaaggcggtgggggacctaggaccttcccctcagataaaatctcagccagtcctttggccaggcacagtggctcatgaccataatctcaccactttgggaggccaaggcagggcactgcttgaggccagaaactcaagaccaatctgggcaacagagggagaccccatctcagaaaaaaaaaaaaaaaaaaggtagctgggtgtgggggtgcatgtctgagttcccagctactcaggaggcagaggtgggaggactgcttgagcccaggagtttgaagctgcagtgagctgtgatcgtactacactccagcatgggcgacagtgagaccctgtctcaacgctccccttcccaccacacacttgcagccagtcccactgaggggactccggacccttggcctccaggcctctccctttccatagccaggcgctcacctatcaagcatcaagcgcagccattttttgtctacgctaccccttccctacttccctgggtatagccctctgcctttcctttgtagaactgtactccatgccccttattccaaccacgtggttctgacaggggcttccaagctcagtattcctgccccaaggggctagccatagtgccactcacttatctggtacctctcggcctcccagtcccccttccatgctctgtcccacaggggctggaagccagcaagctgtatttcccagactcccttaccagctagtttccatcagtaatgaggtgggagaatggaagaaaagcagcaccctggtcctcatggacaatggcaggtgctgatggctgtggctgtgtgacagccatggaggtggggtgggttctggacctcagtggccagggcagaagcaggacatgctatgtgcatccagaaccaattgagatgatgtctccaacacgacagaacaggaggtggctcgcaggttcagtccaggtctgggaggggtttctcatctctgggtgtcactcctgcttcctttttcctcctctagttcctcaacactgttgttacaaagtccctgcatttaactccctccatctgaaaccctccaagtggtttccgtcttcttgactagaggggaccattatagcactgggcagaaaactcagaataacttgagcttaggacactgcacctgagccgatgaggaaaactctcttctcgtttgcttttgagcctcctaggatggaaatggagcttaaggggtcagtcccagcctcaggaaaggtgctggccagaaagaatgaagctgatgtgcagagaaaggcagggacgagaagtgaagcaaggacatcctgatggtgtttaaagtcctggttttattttattttatttttgagagtttcactctttcatccaggctggagtgaagtggtgcgatctcagctcactgtaacctccaccctccaggtttaagtgattctcctgcctcagcctcctgagtagctgagattacagatgtgtgccaccatgcctagctaacctttgtatttttagtagagacagggttttgcaatgttggccaggctggtcttcaactcccagcctcaggtgatctgcctgcctcagactcccaaagtgctggcattacaggtgtgagccaccacacctggccatacatttcctttctagtttatttatttatattttttgagatggagtttcactcttattgcccaggctggagtgcaatggcgcgatctcggctcaccacaacctccgcgtcctgggttcaagcgattctcctgcctcagcctcctgagtagctgggattacaggcgtgcgccaccacacctggctaattttgtatttttagtagagatggggtttctccatgttggtcagactgatctcgaactcccgacctcaggtgatccacccacctcagcctcccaaagtgctgggattacaggcgtgagccaccgctcccggccccacatttccttcctaattaagcaagtctgagctgggtttccagcacttgctgctaaatgaaccatgatgattagagcagcccttgctaagtgggattgaggtggcatgagccgactgtctgtagagaagcgaggcctggaggaagggacgggcagctgtctggcctctgcccttcagccaccctggtcttcacacctaccttttcttgcttggatgtaggatccagcacgagggtcccatcagagtccagggcgcaggcgaccccacagaagagagcccgcatgggcacacctgcatccaccaatgccatgcaggcggcattcagacaacaggccaggagctgagcaccacaggaaatggttaagtttcttttttttttttttggagatggagtttcgctcttgttgcccaggctggagtgcaatggtgtgatctcggctcactgcaacctccacctcctgggttcaagcaattctcctgcctcagcctcctgagtagctgggattacaggcacccaccaccacacccggctaatctttgtatttttagtagagatggggtttcactatgttggccaggctggtctgaaaactcctgacctcaggtgatccacctgcctcggcctcccaaagtgctgggattacaggcatgagccaccacgcccagcctaagaagtttctactgtaggcctggccagcagagcagatccatgcctccctccaccaggctgatgcctatggcagacatcactaatcggtcacagaagggcagtatggcagagtggttaaaagtggtccggggatcaagtagccctgggttccagacctagttttgctcagctgtgtgaccttgaacaagtgacttactccttgagtctcaatctcctcatctgttagatggggaatataataatattcaataggtatgtactgaagtacgtaccacacatttgttggcaaatagggtcagagaggggaagaaaccttccaaagacacgagggggaggcactggcaaagccaggcccgaaacttgggtagcagccactccccggtgacagagctggcagggcaatggaggaagagccacctcgctgctgcctgcaggaagctcacagtggaaagagagcacaggttgggagtcagctggctctgcctcagtttcctaatgtgtttcttctccaggcctagcagccagacaaagaccacagctttagtcaaccggttccagctctgctgctgatcctccacgccttcctctgggcttcactttccacttctgtaaaatggggtcacaataccttctctctctgcccatccataaaatgtctgtccagttcagggccacgttccagtaaagccttctacagtgtctaattctagtcctcaacctcaacctctcgcacctcagacatggagatcttacaaggccacgctcctgactcagctgctgtctgctcagggcgcccccagcactgagggcctgaaatccactgaggtgccgagtagaagtgattgccagccgggcacagtagctcatgcctgtaaccccagcactttgggaggccaaggtggactgatcactcgaggtcaggagttcgagaccagcctggccaacacagcaaaaccccgtctctactaaaaatacaaaaattagcctggcgtggtggcaggcacctgtaattccacctgtaattcaggaggctaaagcatgggaatcgcttgagcccgggaggtagaggttgcagtaagctgacattgcaccactgcatccagcctgggtgacagagtgagagcctgtctcaaaaacaaacaaaaaaacccaaaaaacaaaagaagtgattggcacaggctctggagtcagactggcctgggcttgagtcctgcctgtgctgccttccagctgtgtgaccttgggcaagccccttcccctctctgggcctcagttttgtcacctgaaacatgcgaacataagaacactcatctgccagggtccgtgggctctagaactagacggtctgggtctaagtcttggctctgccacttccacggggatcataagggcatgtgctatattacatgagttaatgtgcataaggcacacagaacagtgcctggcacataagtaagcacccaggctgtttgctctccttcttcagtgagctggtacctgtcaagtgtttgaaggctttctggctagcagtgagggtatatgtatccgccaggagggaagcaatcaggagacttcctggaggaggaggcctggcagaaaggatacagagccggcatcgctgacaacctgcagcaccacggtgatggaggtgcgggggtgcaacgtgcccagcaccaccgcctcgcacgtgttcctgatcagccgctcccggctcttctctgcaacacctggggaaattgaagagaggttcagggtcttccccttcatttgactcaccttcctccatacgcctcacccaaattcccagaaagggctcacggtctcagcctgggatggtgcagttacctgcagggatgatggaagattccagtgggaagaaggcaaggcctgactgccatccactgacccctgctacctccagcatccaccaagggaaccatccaagggaagaagacctgggagttccatgtctgtgctgctacccacgcccactcccaccctagcaggtccagtcagtggggactgagggatatgagggtaaaagggtggaaaaacaggttaatggtccaggcacagtggctcgcgcctgtaatcccaacactttggggggctgaggcgggcggatcacttgaggtcaggagatcaagaccatcctggccaacatggtgaaaccccatctctactaaaaaaatacaaaaaattagtgggcatggtggcacgtgcctgtaatcccagcgactcgggaggctgagccaggggaattgcttgaatctgggaggcagaggttgcagtgagctgagatcgtgccactgcactccagccggggtgacagagcgagacactgtctccaaaaaaaaaataaataaataaaaataaataaaagaaaaacaggttaatggaatgaatgagagtggaggcagagagagggagaaaagagggagggagaaattagaggcagagagagaagcaacagaagatgagttattaattagaggcggagagttaaagacagaaacagctgagtggagacccaagcggggagtggagactcggggcagctggtagggaggagctgggggggtgattttgacaaactgggcaccactcagaggttcagcagggcccaattaccaggcagcccaatcttcggcctcaggatcacttcgagtgtggccttgttgaaaatctctttgctgaccttcacctcggccggcccgtacacacccgccaggacagaggtgtcacctgaggagacagcagggagggcctcactcacagcttccctgctcctggggccccatttgtggcactgagcctgacggccagggctccccacgtcacccccgccatttgttggtactgattctttgagcactcacttcatttctctcatttgtaaaatggggaaaatagcagtccctccccgctagcgtcttgtgaggatcaaaggacacaattcacagaaaacacttagaacactgcggggctcacgctgaatgtgcaacagactttagctgtattagtaacattcgtccattcaggcattcaggcagggtctcactctcattgcccaggctggagtgcagtggtgccatcacggctcattgcagccttgaccttctgggctcaagtgatcctcccgcctcagcctcccaagtagctggaactacaggcatgtgccaccatgcctgactaatttttatatttttagtagagaggggattttgccatgttgctcaggcgggtttcgaactcctgggcaactgtaatcccaaggtgctaggattacaggcgtgagctaccacgcctggccctgatattagtaatttttttttttttaatgagatggagtcttgctctgtcgcccaggctggagtgcagtggcgtaatctcggctcaccgcaacctctgcctcccgggttcaagcagttctcctgcctcagcctactgagtagctgggattacaggcgcgcgccaccacacctggctaatttttttatttttagtagagactgggtttcaccatgttggtcaggctggtctcgaacttcctgacctcatgatctgcccgcctcccaaagcgctgggattacaggcgtgagccactgtgcccggctggtattagtaacttttaacaggaagttcttcctgaaagctaaccatcctccctcttactgcagctgctctcaacttctctttccaaagcttccccagcccagctcttcccttaggcactggcccccaaattttgcatcagtctggacacctgagaaagggataatatctggaatgaatcctgattccttatttccccagaagctatgaacggggtacaggaggtaaaacctaagaaataaacagcctggcttctagtactgtctgctgtaatcccagcactttgggaggctgaggtgggtggatcacctgaggtcaggagtttgagaccatcctagtcaacatggtgaaaccctatctctactaaagatacaaaaattagctgggcatagtggtgggtgcctgtaatctcagctacttgggaggccgacgcaggagaattgctggaaccggggaggcggaggttgcagtgagccgagatcacaccattgcactccagcctggacaataacagcaaggcttagtctcaataaaaaaaaaaaaatacattttaggccaggcatggtggctcacacctgtaatcccagcactatggaggcccaggtgggaggactgcttgaggccaggagtttgagaccagcctgagcagcataggaagactcctgtctctattttcttttttgggacagagtttccctctgtcacccaggaggctggagtgcagtggcgcaatctcagttcactgcaacctccgcctcccaggctcaagtgattcttgtacctcaacctccagagtagctgagattacaggtgcgtgctaccacatccgactaatttttgtatttttagtagagatgggttttcaccatgttggccaatctggtctcagaactcctgacctcaaccaagcgaggtggctcacgcctgtaatcccagcactgtgggaggctgaggcaggtggatcacagggtcaggagttcaagatcagcctggccaacatggtgaaaccccgtctctactaaaaaccacaaaaattagccgggcgcggtggcacgcacctgtggtcccagctactcaggaggctgaggcagaagaattgcttgaacccgggaggtggagggtgcagtgagccacgatcacttcactgcactccagcctgggcgacagggcgagactccatctcaaaaaaaaaaaaagaaaaaaaaaaaaagaactcctgacctcagaggcctcccaaagtgctgggattaccgctgtgagcaactgcacccggcctcttcttaattcttacgttcgaagaaactttaggtatctcaattcagcataagcgctaagcctgagggagggcctgggaaggtccttggttaaggccgtatttcctgggaagcccaatttgcccttacacggaaggtatgcttagttccaggagaaactgccctgaggactggagaagttaccaaaacagaacttgcctctggctccagatgaactgcctgtgttttgcccgagcacaagagtctctcccctctcaccttcttgaagacgtggctccagcaattctctcccctgttgaccccacaacaatctacaactcctgccccacttatctgatcctcttacagcagaactcctgaacagctgcctcttcttccttttctgtgaccccaccactccattgcggcagctcaacatcgtcaccactgacctccaaatgatcaaccctcccatgacccggctgtcagtaaggctgaaacagctggtcagccctcacatctcagacatgctcttttcttggccccaggtcaccaccatctcctggtttccccctaactctctgggcgttccttctgagtctcctttgctagcttgtcacatgtctctgactgctcaagttggaaggcctagggcttggtcctgggacctcttctcttttccatctacactcacttcgttcaggcaatagcctgaaataccatctatatagccagagagttccaaattgcctatgtccagcttgggtctctcttctgatttccagacttgtacagatctgggcagaaaccttagttatgcctgaatctttttcctcgcactcaaaccaaactatacgtaagttttgtccgtattactttcaaactacatccagaatctcatcacctccactactcctgctctggctggagccaccatcacctccctgttttcccccatactccccacaatcaacacagcagccaaattttgttaaaatgtattggggctgggcgtggtggctcatacctgtatgagcactttgggaggaggattgcttgagcccaggagttcaagaccaacctgggtgacatcgtgagacgctgtctcaattttttttttttttgagacagagtcttgctttgtcgctcacgctggagtacaatggcacgatctcggcccactgcaacttctgcctcccaggttcaagtgattgtcctgcctcagcctcccgagtagctgggattacaggcgcccgccaccatgcctggctagtttttgtatttttagtagagacagggtttcgccatgttggccaggctggtctcgaactcctgacctcaggtgagccacaggtcttggcctcccaaagtgtggggattacaggcgtgagccaccgcccccggcctcccgtctcaaacgttaaagagaaatattcttggagttaatctacttctgagagttatttagctaggaaaaggggatatttgctctataggtaagacttgccctaatcttttttttttttttttttttgacttgccctaatcttagggatatttacttgtgtggagagatgcagtgaggtagcggtggggatgtatttctcaacccagcgcaatgacattatcttcaatttgaggagtatttacgtgggtgaaagatccgccacagtccacagtatgcaaatagacaggtttgcttcagtccgggatgcaaggacctagagggtgtgtgtgtggggggtgggggtgggagggtggaggaggaatcgagttaagggggatatttaccctggcgaggtgattttccctattctgaaatatcaattcttgggcggacagtctgcccctcctctcattctcagagatagttacaaagatggaactatcttctcctttctagtcgtgagggagagatgtgtgtatccctgcgtatttagtagtattcaatcggacaagaaatcatgcatcaacgcaggagtgacatttaccagctggtatcgtgaggaggtgggcactcggttgcacagtacacggtagtccctctccaaaagaaagacctgggtgaagttcttaccttgcaggaaggaagcagagccatctggccgcgacagcaggttctgttcgcaggcaaagtgccggaggctgcagccaggaccccgagggctggaccctgttccattttcagcacggattttggcgtcagtatgcgtctcctcctccatcgcgccgagcccacgtgcggctgcagttgtcacttccgcctggcagcgcgcgccgcaaacaggctgcgtaaccagtgcgcacgcgccgggctgggccatcctcctgggcgtccgcacgtggcttagcgtttaccaacaatctggctccgcccagtcccacctcctaactctggcaacgccattggacatttgggaacagaaggcaggccttggcattgatccgctttactctgggcccccgggccctaaatccctgaggccctggtcaggttgccctcttctttgcctgttacaggagtaactacaatgaggcgattggagaaaattttgggtagatagatttttttttctccaaatctctgtgcattctatctaccacagaacgggaagaagatggttttcttgtcagatggtgctggagtttgcgtcaggcacataaagaggcagccccgaatctagcctacgtgagtgccggaccgctgagtggttgttagccaagatggcggtagcgatcgctgcagcgagggtctggcggctaaaccgtggtttgagccaggctgccctcctgctgctgcggcagcctggggctcggggactggctagatctgtgagtacctgggccccaggcggttttcccaaaggggattagggatgtaaaggctatcttcagagtgtggggtccctgaaggatatgaaggaagggctgtcacaaaagggaaaaagagtgggagactccttggagaagacaccgaagggaagatctgccacttccttaggagacgaaaagaacttccacttctttaggagaggaaaaaacccgtttgcaacttctttgtgggccctgagggagacgacttgaagagagagatgggggttccttattagctgccactggtattcaggggaggctccttggaggaacaggggaagaccgcaagaccttctccctcagggtttggagaatgaaactgactttgtaagggagggactttcttctgggcaaagatccctcttcaagaagaagaaagaagagaacaggtccctgtcacaggctgcatagggccttgtatttctttgctcctttgccacaattctgattttaaaatgaattgtgtaaaaaatttgtttgattcctgtgtctcttgatcgaatatcaagacagagaattcgtgtgttctggacactgtacagaggagacgattaatatttgttgaattaatgaggggaaaaaaggagggagagaggtacagacagggcactttgcccacatttcttagaaacacttgagaaggctttgtttcttgtcaaaagggtcacaatcccttcaggtggatgctgctaagggcaagattacactgcaaaaaacctaggtggaagcctatctttagacggggagaggcaatgggttgcagaagagctttgaactacagttgacagataggagagtagtggttacatgggtggatgcatgtccttgctctgccgctttccacttgtgtagccttggccaacggactgcacttctctggatctatggagctaattttcctctctaaaatattaacagtggccacctcatagggctgtgaaaaatcaatatgtaaaatgctaaggactggacctggcacatcctaagggcaataggaatgttgatagtgagggtggagggaagggacagaaactaaccttggagatggggagaagaaaggggtgaccttgggaaggcctggattggtgaggccctggggaaaaaaatctgaaaagatattgtgaggttgagtctgatcctctgatccccaatccataaggaggggaagatggaatctgtagaaagaagctctgggtaggggaacaaacgggaggagggtgaagaagatgggccaggagtaggacgtagtaggtatctaggaacggagtcacttgaaacaggtaaatacagaagggctgcaggagcaaggtgtgggtagggcagtctcttgcctttgggctggagaccttttcacttttttttttttttttttttttgagcagttcatatcctccacagctgatctcagtcccaggggcccattggctgggcaagtggggcaggaggtgggcaggactggggcaggctagggaaaggtcatttatggctgattaaatctttctctcctgtctcaatctcttgattacctttcctcttgcttcccctacttcatttttggtggggagtggggagggaagaagtccctactttttatttatatatatttaaatttgtattatcttaagagttattgttttttcccctttatttctcccacctgttctttctctcttcttctttctttcctctccttctcctctcctctcctcccctctcctttttcttttcttttctttttccctttcctttcctttccttttctcttctcttttctctctctctttctttctgtacctctctttcctttttctttttttttcttttttgagacagagtttcactctctcgcctaggctggagtgcagcagcatgatcttgacttactgcaatctctgcctgccgagttcaagcaattctcctgcctcagcctccctagtagctgggattacaggcatgcactatcacgcctggctaatttttgtatttttggtagggacgaggtttcaccatgttgtccaggctggtctcgaacttctggcctcaagttccgcctgtcttggcctccaaaagcatgagccactgcgcctagccttttctttttttgagacaaggtctcactctgtcacccaggctggagtgagtgcagtggtgtgatcatggctcactgcagcctcaacctcctgggctcaagcaatccccccacctccacctcctaagtagctgggaccacaggcacgtgctactacgcctggctaatttttaatttttttttttttttttgagacggagtcttgctctgtcacccaagctggagtgcagtggcacgatctcggctcactgcaacctccacttcccaggttcaagtgattctcctgcctcagcctcccaaatagctgggactactggcgtgcgccaccatacccagttaatttttgtatttttagtagagatggggtttcaccatgttgaccaggctggtcttgaactcctgatctaaggtgatctgcccgcctcggcctcccaaagtgctgggattacaggcataagccactgtgcctggctgcgcctggctaatttttaaatctttgtagagatggggttttgccatgttttccaggctggtcttgaactcctggactcaagcgatcttcctgcctcagcctcccaaagtgcaggatgacaagcgtgagccaccttgcctggccatattattaaattatcatgagtttaagtttaagtagccacaagtgggctgggtgcggtggctcatgcctgtaatcccagcattttgagaggccaaggtgggcgggttgcctgaggccaggagttcaagaccagcctggccaacatggtgaaaccccatctctactaaaaatacaaaaaaattagctgggcgtaatggcgtgtgcctgtagtcccagctacttgggaggctgaggcagaagaatcgcttgaacctgggaggcggagattgcagtgagccgagatcgcaccactataccccagcctaggtgacagagcagccctctgtctcaaaataagatagccacaagtggttggtggctgccacattagatggtgcagggtttttgttttgttttgttttttgttttttcgaggtggagttttgctctcattgcctaggctggagtgcaatggcatgatcttggctcaccacaacctcctcttcctgggttcaagcgattctcctgcctcagcctcccgagtagctgggattacaggcatgcaccaccatgcctggctaattttgtatttttagtagagacagggtttctccatgttgatcaggctggtcttgaactcccgacctcaggcgacccacccacctcggcctcccagagtgctgggattacaggtgtgagccaccatgcctggctaagatgatgcagttttatccaggtggagatgaagaaatagtcagggaaaggttgagaggctgcatattgtagacagattggattactgggttcactggggaagattggattagaaggaggagtggggctgctttacttgtccccgacttcttgcccctgctctgcccactccttcattgaataccctgctgccctgcagatgtgtttgcctgattttcacctcccttcctgtctctgttatcatagcagacgttttagtgctcagggaaaggaggaggaaggaaactcagattgtcaaggaattgtgagtcagtttctcagccactaccccaggcctgggcttggctaagtcatttcacctctctgaccctagctagtggggtgaatagagtccctaccctgttggaagtcaggaagcccctggagctcgctctgtgctaattatcggtgactatttctgtgacccagctcttcaggggcagcctgtctgggggttccagtgccctgtgcagtatctccaagtggtaggtactcagtgtatgtattagtccgttttcaggctgctaataaaaacacacccaagactgggtaatttataaagaaaaagaggcttaatggactcacagttccacatggctggggaagcctcacaaacatggcggaaggcaaatgaggagcaaagtcacatcttacatggtggcaggcagacagagtgcttgcaggggaactcccctttataaaaccatcagatctcgtgagacttattcagtataatgagaacagcacgtgaaagatccacccccataattcaattacctcccactggctccttcccacaacatgtgggaattatgggagctataattcaagatgagatttgagtggggacagagacaaaccatgtcagtgtgtattgtgggatgaatggagatggtcattacagtcttctaagtgtatgggtccatctcttacttgctagtgtgttaagaaacctggcctcctttttcacatcttgaggcactgaatggtttacaaatccaactctaattttttattatatttaatacaccaatagtgcaaggcctttattggtagtactctcctattacagatggagagactgaggctcagagaggtgaggtctgaacttggagctctggactccaaaacccagtttcttttcatggtaccaggctgccaggaggagaaaggatggagcttagattcaagtcttgcaacattcttcttagtccagtattggcttattttgttttatatttttttgagacggagtcttgctctgttacccaggctggagtgcagtggcgtgatttctgctcactgcaacctctgcctcctgggttaagcgattgtcctgcctccccctctcgagtagctgggactacaggtgtgtgccaccgtgtccggctaatttttatatttttaatagagacagggttttgccatgttggccaggctggtctcgaactcctggcctcaactgatccacccacctcagcctcccaaagtgctggggttacaggcgtgagccaccatgtgtggccgggcaggtgatttttcttgtctttcgcctctttccacttcagtccccctggccatctttcccttccttgaatgtgcctcctcccacctggtggcctttgtaggtatgaggtccttcagatgatggctgacatgacacttcctcagagaagcgttccagaccccaaacaccaggtctctgtctgtgaaacagggacagtgatacctgcctaatctgcacgcctttcccttctcacgagatattctgggaagggggactcaactctttgctctgtttgagggcagagtgcctttgagctcaggagagagtgggtttgggtggccttagctaccctagatacggaggacttggagttaactggcaccatccacaaagccttgcatgcactggacctgaacaagttgcttagcccttgaggcggcgcctcagctaccacctgtctttgatggagttatgataacagtgcctgccccgtctggatgccttatgggttcagtgagcacataggtgtaaataaagtgctttgagtggcacctcagcatgtagttattctctgattgacctatagcagccatgccagtcttcagggtcccagggcgccaggctttcttctcttgccttggagccttggtttttccctaggactgaagtgttctgaccccttggctgaactcccccttctttaggaagctttccctggtgtgccatctgatgctggtgcttcctggaggggtactatctgatcctagctggtgaggcattcctgccagagctgcggcaggtgctttccccgcctctccaccagcctgtgaggtggatgccatccccacgagggcacgcaggttcacagagactggctcctgtccaaggccgcgtggctggaaagagacagaaccagattcaaacaccagcagtttaaccctagagaccctcatcctacctcctatgtgggtaaccactatacatcctgcctcctctgaaatctcccgtttttttttattttaaaattttatgtgagtatttacttatttatttgctgctgttgttattgttttgagacagagtcttgctctgttttcacccaggctggagtgcagtggtgcgatcttggctcactgcaacctctgcctcctcggctcaagcgattctcgtgcctcagtctcccgagtagctgggactacagacatgcaccaccatgcctggctaatttttgtgtctttagtagagatggggtttcgccatattggccaggctggtcttgaactcctggcttcgagtgaactgcctgccctggcctcccaaagtattgagattataagcataagccactgtgcccggccaaaattttatttatttatttatttttttgagatgtagtcttgctctgtcacccaggctggagtgcagtggcacaatctcggctcactgcaagctctgcctcccaggttgacgccattctcctgcctcagcctcccgagtagctgggactacaggcgcccgccaccacgcccggctaattttttgtatttttagtagagatagggtttcaccttattagccaggatggtctcgatctcccgacctcatgatccgcccgcctcggtctcccaaagtgctgggattacaggcgtgagccaccacgcccagcctaattttatttattaatttatttgagatggagtctcactctgtcacccaggctggagtgcagtggtgcgatcttggctcactgcaacctccacctcccaggttcaagcgattctcctgcctcagcctcctgagtagctgggactataggtgcgtgccaccacgcctggctaatttttgtatttttagtagagatggggtttcaccatcgtgatcagcctgacaggctggtcatgaactcctgaccttaagtgattcacctgcctcagcctcccaaatctgctgggattacaggcatgagccaccgcacccagccatattatttctgtattttcatttggcttacctgtcaacttgacacttttttgtttttttaggctagtcaggtgaagcaatgtgagtaagatcacctgtcttgattataacttgtgtgttcagtgtttgtcattcatccctccctgtctctagccttcagttcagggcatgatttggagcaaatgttcagtatctgtttaacaagaacaatcatgagaaatacttactcactacttgtgtttatgaaacattatgtgccaggcactgggctgagcaatccacacaggtcaactcggttaatcctcatgacaacccctgagataagtacttataccaccctcggtgtacacaggaggaaactgaggctcagggagtttttctttaaaaattttttcttttttttttccttgagacaggtcttactttgtcacccaggctggagtgcagtggtgtgatcttggctcactgcagcctcttgggctccagcgatcctcccacctcagcccctcaagtagttggggagtacaggtgtgcaccaccatgcccagctaattttttgtagggatggggtcttgccatgttatccaggctggtcttgaactcctgggctcaagcgatcctccctccttggcctcccaaagtgctggtattacaagtgtgaaccaccacacctggccttaaattttatttatatatttatttttgtagagacgaggtctcactatgtttcccaggctggcctcgaactcctggactcaagtgatcctcttgcctcagcctccagagtagctagaattacaggcgtctgccactgcacttggctcagggagtttaagtcacataatcaggcagcggtctgctcagttagagtccatgcgcttagccatggtgccttcaagtgactccaccagggtcaccccagtacttcctgggcagaccagaccatccagagcgggcaggttgtgctttcctgcatggtgggagaggacgtggcatgaagctttgtgtaaatctgtgcagcctctgccattgtaaatcactggccaccgggacagactcccccacccccttccaaaaactagaggaacagatgggtggagtcgcatccttcctctgcaggcatttggccacccactcccattatggagcatttcctcaggaccaggcacagcgtggagccctttgcatagctcactgaattggggcagcaaccctggggctggggactaccattatctccaccagcccagcaaagaggggaggagggtacagccgagacccagctgcagtatgtggagcacactggggtgccgtgaagatagctgtccagcctctagaggctgacagtcctgccctgacacagtggtttgttctcagactctggcctcccctcttagtgcccgtctgaagacttcagccttcggtcctcttccatcagcatgccgtctcccctgtgcctcagtctccctctctggagtatctgctggggccacagtttggttttattgttctttgagacagggtatcactttgttgcccaggctggagtgcaatggtgcagtcatggctcactgcagccttgacctcctgggctcaagccatcctctcacctcagcctcccgcaactccagtatctggactacatgtaaatgccaccattcccagctaatttttttttttttttttagatagagtctcactcttgtcacccaggctggagtgcaatggtgccatcttggctcactgcaacatccgcctcccaggttcaagccattctcctgcctcagcctcccaagtagctgggattacaggcacctaccatcatgcacggctgttttttgtatttttagtagagacagggtttcactatgttggccaggctggtcttgaactcctgacctcaggtgatctgcctgcctcggactcccaaagtgctgggattacaggcgtgagccaccacgcccagccttcctggctaatttaaaaatttttcagagacgagggttttgcctaggctggactcactatgttgcctaggctgatctcgaaccactggccttaagtgatcctcccacctcagcctcccaaagtactgggattacaggcatgagccgctgcacatcgccacagtttgattttagtatccactttaaggtgcagttagttcttcccagctcctcttttccctatctcatacagtgtagtcacttccctttctcccacttctcaccttcctagattttgtttttctctctcttaccaagttttgagtatgtaatacgtcccagatcggtgctgaacccctggtgtgagttaacttagcaacttttcacgtggtgttctgcagccttcttacagataaggaaattcagagaggtgaagtgtttttgcagagagccacacaatgagctaagaaattagaacccagggcagttgaactccagagccagggaacttaacagcccattcatgcattcactcaggaattccctcttgagtgcctgctgtgaaggcaacctggacgctgtctctgccttcctgggattgtggtgtgtgtgggagacagacacgaaacaaagcaatcttctaggtcagtgtctggctatgctgggtactcagaagggggaagcactgtgctgcaagaggccggctgtttcctcctcacaaggggaggcctgcagtgacattgccaggcctgaatctgccctgccattgggagtgtaatttcctcacgactacaaatgcaaataaatacacacactgaacatgctaccccgctagaactgtggacagcttgttcactgcagttaaaggaagacggagggacacatttgagcacgcatgtgtgagatccagcttgtggcaaaccctgccattctttaacatctgtgggaagtgaagccaccattactgacctcggaggaatcccgggagtagtgggaagaaaagttgcagatgtttgaaaatcaggctgcaggggcagttggggtgaggagcatggatgtctaggagcctgaatctcagcgttggaagcccagttctgatgtaatttttttttttttttttttttttgagacagggtctcactttgtcccccaggctggagtgcagtggcacagtctcagctcactacagcctcatccttccaggttcaagcagtcctcctgcctcagcctcccaagtagctgggaccacaggcatgtgtcaccatgcctttctaatgtttgtatttttttgtggagacagggtttctcactgttgcccaggctggtctcaaactcctgagctcatgtgatcctcctgccttggccttccaaagtgctaggattacaggcgtaagccactgcccagcatccccacctttttttttttttttttaaatttgtggtttggtgcaggttattttacctccccaggcctcggtttcctcatctactcaagggcaatggcagataatcaacctcacaaattccccgaggagttagtaggcttgtgcctgccaggctcagctggcttacagcaggtgcttcataagggggagctattgcaacgcctcggctggttctaggctgcctagctccagagctaagagtcccagtgggttcatatccctttgagcatttataggcttctcacaggtctcctgggctttctcagccattcctcatctgacctgaggaggtgtgatgtccttgcaggactcctccagcccctctgagcttttttttttgtttgagacagcatgttgctctgttgcccaggctggagtgcagtggtgtgatcatggcttactgcagcctccacctcctggggtcaagcgattctcccacctcagccttccaagtagctgggactataggtgtatgttaccatgcttgagtaatttttaaaattttttgtagagatgtgatctcaggctggtcttgaactcctgggctcacctgggctcaagtaatccttgagcccaaagtgttgggattacagatatgagccaccttgccaggccctgagctccttctgtcttccatgaaggacacactattccttgccttttgtctttttttgtgtgtgtggcagggtctctgttgcccaggctgggatgtgttggtgcaatctgggcttattgcaacctccgcttcccggattcaagtgattctcctgcctcagcctcttgagtagctgggattacaggtgtgcgcaaccacgcccagctaatttttgtatttttggtagacatggggtttcaccatgttggccaggctggtctcagcctcccgaagtgttgggattacaggcataagccactgtgcctggccactttttgtcttttgcatgttctatacaccttgccgagaatgtgctttccctgcctcctggttatccctcaggtttcagctctaacatcacttccccagggaagccttaccctcgctttcttctgctataggataatatgaaccaccatcattgttacttgtttagtgtctgccctccctgctaggcagcaaggacagatatcttgcctgtcttaggtccccagaacccagcacagggcttggaacatgtcaggtgctcaaatatttgttgaatgagtcagtctgggctcgcagagggagctgggaccagagtagagtggacactgaagcgtatgtagcagtttgccaggcgatagggaaagagaccttcttgtaaagcaagcagagatgagagggagaaatgagaattgctaagattgttttgagcatttgttaggtggcttacagatgctttgctgaacattttattcatgtgatcttgtttaagcctctcatttccatgaggggttctccatttttatagacaaggaaggggacacgtggagaggggaagttactttgccatatcaccctctaagggatttttttttttttttttttttttgagatggagtctcactgtcaccaggctagagtgctatggcgcaatctcggctcactgcaacccccacctcccgggttcaagtgattctcttgcctcagcctcctgagtagctgggactacaggcatgtgccaccacatccggctaatttttctatttttagtgggtacagggtttcgccatgttggccacattgatctcgaactcctgacctcaagtgagattcgcctgcctctgcctcctaaaggcagtaagggaattgaacctaggcagtctgactcttaagagctcaaagacttaagctctgtcctgagtagcttcgctggtgtatggtatagggatcagaagagagctggtctgtatgcctagagggcatcctgcagtgggcatgtgtgtctgtggtcacagtgggagagagagaggagggggcatctgtggccagaatggggaggcctcgaatgccaggatgaagagtttgggcctatggtaatgagaatagtaatagctaccagttattgacttgccagccacttgattgagtcatttaacctcacaacagtcctatgggataggtgttaactgttttcatcccagtttttcagatggggaaactgagacacagaagttgtagtcagttatccaaagtgtcgcagtgagaaagtgctggagttggggctcagaccctgtgagtcaggccccagagttcactggggccacatgctcaaccaccatgccgcctgcctgccgccggggctgagccagcggaaacctgggtgctgcttctgatgcaggtggtctcctctgctctcttccccagcacccccccaggcagcagcagcagttttcatctctggatgacaagccccagttcccaggggcctcggcggagtttatagataagttggaattcatccagcccaacgtcatctctggaatccccatctaccgcgtcatggaccggcaaggccagatcatcaaccccagcgaggacccccacgtgagaggcggcctcccccacttcccgtgccccccacgcccaggccccttgcctgtctcctctctggtcccaactgccccacgtctatctgtgcctccacccgcagctgccgaaggagaaggtgctgaagctctacaagagcatgacactgcttaacaccatggaccgcatcctctatgagtctcagcggcaggtgcgtggggacaggactaggggcggggggctggaattacctgaggtcccctacctgtgtttgggccaaaggaatggctcccaaggaggacagattcttttttgggggggttccatagagttctgagggttctcttgggactctggaggagaagtgtgagagcagtcctgccttagggcagaaggatggacctgatcactaaaaaacacctactgtgtgcctggctgggggctcgcctgtgtggggagagggcagggagaaggcctgacagcccttcctcttggaaatgcacagtcctgagaaacagggtgggtccccagtgcttcctggagtgctccaggggaccgccctaggcccatgtgaaatgggctgtgatcccctgataaatcctagtatcagggacaaggatccagtcaagccagtgtcaacaaagagggaagttattgactccaatgaccatacatccagagggtcctgttttggggcacagctagatccagggggtcttccaggcaggaagtagagggaaggcggaaggccagacatggcacatcccagctatcccacacccccacctttatagagctttctgggtagtcccacctagtgacatctgcatacatttcctgggccactcctagctgcaggggagactgagaaatgtattaataatactttagtcccggcagttgctgcctgcgggagattgagacctctgttaacagaggaggggaatagtatactgggaaggcaaccaggagcctctgccagtagccccgagtcctgatcctcagggggctggttgcaggctcttacccacgctaacctggacagtcctgccaggccctcagtactcagcaccgcccactcacttggcactggaatgtgcattaacttttaattggctccccacttagaagaaagcacacattcatcagtttcccccacagcaacgggaaagccaggcctgggaacacatggaggagggcaccgccgagccgcgaggagctctggccccggggtgtccctcagggtgctggccaggctgcctttgttccgctttacacatggccctgtgtgatctcatgtccatccgtatgccagggctgcccagagccccagccagactgcttgtcagagccctgcttggcttctcgccctggatgtcccacagcaaactaatcctgtctgaacttgacctcgacatcttcctcccaggcgtgctcctttgcctcacctagtccgtttctcagtgaagagcaccaccatccacctgcttgcccacaccagaaacctcatctcatccctgtctcctccctcccccttgctatccctttctcccctctcattccctctgtctgtagatatttcttttttttttttttttttacttttgagatggagttttgctcttgttgcccaggctggagtgcaatggcacgatcttggctcaccgcctccctggttcaagcgattctcctgcctcagcctcccgagtagctgggattacaggcatgcgccaccacacctggctaattttgtatttttagtagagatggggtttctccatgttggtcagtctggtctcgaactccctacctcaggtgatctgcctgccttggcctcccaaaatggtaggattataggtgtgagccactgcacccagctgtagctacttcttttcttttatgttatttttatttatttatttagagacggagtccacctctgtcgcccaggctggagtgcagtggcgcaatctcggctcactgcaacctccgcctcccaggttcaagtgattctcctgccttagccccccaagtagctgggattacaggcgcccaccaccacactcggctaatttttgtatttttagtagagatggggtttcaccacattggccaggctagtctggaactcctgacctcaagtgatccgcctgccttggcctcccaaagtaccgggattacaggtgtgagccaccgtgcctagcctgtctgtagatacatctttaggaagtgctcagctgctcagcagcacactctgagacccagccccatcctttctctgcttcactgttgttggtgagttgaccttcgtgctctgcttgtggcctcgtgttcacagcatggctgctgcatgtccaagcttcatggctgtctgcaaggcaggaagaagtagggagtgggtagggctggcaccagcagcagtggtctcttctatccagaaagcaaaagcagacttccaccaaaatatctggctaaaactgtgtcccatggccacctctggctgcaagggaggccagggacctgagtgcgtgtctttttgaggctcaggttaggggatttgggagaagggaactgggcactggtgtggccagctgacagggtctgctgccccctagcacagccgactcagcttcctcagacacatccacctgctcctctcccgcctccctctgctaccaagctgggcctctgccccctctctcctggcttgctgcaatcagccttgatgactccatccatttacctcactgcagcctgagagcaattctaaaacacaggtctgaccacattgctcccttgagaagactgtcggcaggttaccactattctcagagtaaaatcaatgtatcgttccctttgttatctgggtgccatctcctctccctcctcatctttccccacccctaccactgtatgtcccagcccttctggcctcatggtctatcattccctctgcctggaaccctccacccaccccatctttgcgcactggtcctcaccgatgcccttccgtggtggaacaggtgcttcctttgggcttctatcacagcaactcgatccctctggcagttctaagcagtctggcagcgtcttcttaaaggcaggaaccccagcatggcctggcccaggactggccttcaggaggactgtgaattcatggaggtgttggaagctgggcaggatttggatggctctctgtcattgcccagcataaccaattgtgggaccccggtcccctctacacccccagggccggatctccttctacatgaccaactatggtgaggagggcacgcacgtggggagtgccgccgccctggacaacacggacctggtgtttggccagtaccgggaggcaggtacgtctgtccgtggtttggccctgtggtccccattgaagtgtacactttagtttttctgagtgttcttccaggagcagcatagtgccaggaaggtctaaggagctggaagaagagctttccaagcaagaaagagacaagccagggttaggactctggagggggcagtcttcccactctgaaggccagaaagtgtagtggctcagggtctgtgctcttaaccctttgttaccagttgtcaggttttgggcaagtcacttcccttctctgagcctcagttttctaatctccagaagagggattatgacggtacctgcatccaagggtcgctgggaggatgcagtgaagtcaacgttcgctgtgggtgtggcctgtgcaggagaccctgtctgcctggtgcagtgatcccctggcccctcctcaggtgctgtatccttcggggagcaggagcaggtggaagaaccttgacagacctgagtgcggtgcaagattagaggggcccggcaagcccagatgagtgaaaggaaggaagggtcaaagaccaggaatgaagaaaatcattgagcaggaatgagtgcctgggagcgaaggagtgagcccagggagcagtgagtggggtcttccagggagcttgttggtgtggggccctgcatggggactaccctcagagtgtcagcgagcactgatagggccaggaaggcatatcttaaccctttgtcttagatgcttggggcaagttgcttaactgccctgtgcctctgtttcctcattcgtaagggggatggtagcccttcccaagacagctgttgagggcagtcttggggcagttggcaaagtgccctcagcacagagtaagcgctcagggccaggggttggtgtcatgatcggggactcgccctgggacagcccttcagcagggccagaccacgtggctgtccagagcccccatggaccagcatggcttgcagcctgctcctggactgtctactgctcacagctggaccaggcccttggccccacatgctctaggagggcaaacgccctgtggtgtttgtctaaggtctagtgtcatccgtgcggaaaaagatttccagacaccaggcagcaagctgggcccccgccagctgtgctgagcactgcacctgtttttgctgaagggttctcttgtgagggcaccaggcaggaccgagcaagcctcatgggaatcatgggagccgctgagctctccacatgggagagctggccgcctctgcaagaatgactgtccagcactgagggtcagcagaagtgtctgggcagctgcaaatgggactcatgcagaggcagcatggtgcagggtaaggagttgagtcacatccactctagacttcacttggcaggccactcaccttggtgacgctgtctgtcgtctgtgaagtgagaagagtggtgttcatcatgataggtagtgcctccctgggctcttgacaccagagtgctgttctttttttcttctccttttttttttttgagatggaatctcgctctgttgcccaggctggagtgcagtggcgcgatctcggctcactgcaagctccacctcctgggttcacgccattctcctgcttcagcctcccgagtagctgggactacaggcgcccaccaccatgcctggctaattttttgtatttttagtagaggcgggtttcaccatgttagccaggatggtcttgatctcctgaccttgcgatccgccctcctccacctcctaaagtgctgggattacaggcgtgagccaccatgcctggcctttttttttttttttgaggtggagtctcactctgtcgcccaggctggagtacggtggcgcagtcttggctcattgcaacttctgccttccaggttcaggtgattctcctgcctcagactccggagtagctggaattaaaggcatgcaccaccatgcctggctaatttttgtatttttagtagagatggggtttcaccacgttggtcaggctggtttcaaactcctgacctcaagtgattcgtttgccttggcctcccaaagtgctggggattacaggcatgagccaccgcgccgggccagccaaggtgctgttatatgtgctctttagcctcggagactgtcatttcccctcactgcactgcagagcgagggcacaccgggtgaggttagggcaggccccagtggtgttgcctcattgaggcacctcccccatccatgtgaggcaggagaggcaagcattaccatcaactctaaaagccaggtaagaacctgagtcaacaaaggtgaggtcatgggcccaggccacattctcctaaggagtggagccgagtctttttatggcagtctgacccagagacagctctcgctgtttcccacccttggctgtcttcccagggctatatgtggagtatcagtggtggcactggcagggagtggcgcccggtgaaaaggagtgttaagaggaagcacgtgccaggtgtggtggctcacgcctgtaatcccagcacttcgggaggctgaggcgggaggattgcttgagcccaggagtttgataccagcctgggcaacatggcgagacccccatctctaaaaaattaaaaaattagccaggcgtggtggtgcacacctgtagtcccagctactcaggaagctgagtgggaggattgcttgagcccagaggttcaagactgcagtgagctatgattccaccaccgaactccagtttgggtgacagagtaagatcctgtctctgagaccaacaagaaaagaggtagcatgtgtcaagcaagagcagcagttcccactggacctggagtttcctggtgcaaatcagcctgtgagtctgtattttcttttttcttcaagacggggtcttactctgtcacccaggttgaagtgcagtggcatgatctcggctcactgcaacctctgcctcttaggatcaagtgatcctcccacctcagccccctgaatagctgggaccacaggtgcacgccaccacacctggctaattttttttttgatttttggtagagacggggtttcgctgtgttgcccaggctggtctcaaactcctgagctcaagcagtccacctgcctcacccttccaaagtgctgggattacaggcacgagccactgagcctgacaagtttgtacttttagcacgttcccctgcccctgcccagtccttctcacatgggtggacctagtaccacattctgagaaagcctgattccaaggtcctgtatcagtcccttggaccttctttgaccctctacaagacctttctttccctccttaaccagagcaactcctgtttctatctgttacatatgcagcacagccacatcttgtgtggatttgtattatgtccattcaaaagcatgtgtcagaaaataccagtaaacctgtattaaagttggatgttgaagtagtgctaaccaccctcaactctaactaaaatatcaacaagtgggctgggcgtggtggctcacacctgtaattgcagcactttgggaggctgaggtgggtggatcacctgaggtcgggagtttgagaccagcctgaccaacatggagaaaccccgtctctcctgaaaatgcaaaaattagctggatgtggtggcacatgcctgtaatcccagctactcaggaggctgaggcaggagaatcgcttgaacccaggaggcagaggttgcagtgagccaagattgcgccattgcattctgggcaacaagagcaaaactccgtctcaaaaaaaaaaaaagaaagaaaattaggtagatctagtggtgcacacctggaatcccagctatctgggaggctgaggcataagaattgcttgaacctggaaggtggaggttgcagtgagctcagattgcgccactgcactccagcctgggtggccaagccagactctgtctcaaaaaaaaaaaaaaaaaaaaaaaaaggtaactgctgtgtgtaatgtgatctccattaaatttgtatctaaagagcgggttctgcggtaaagaaaggatttggaaagcactgtactagagagctccctctgaataatgttcccggtctgagtgcttgcagcattgatccacagcgctgcccctaaagtgttggtgtgaaggttgtcccactcttcaggcggggcaaagagcttgtctgagggcaatcacaaacccccttctgtcttctaacttcggaggaagggcccccttaacctggagcggttccctttgatggggaggtgggtgttcaccagaggttttgtttgaagaaaaggttttactgccatacatgggttagagtacttctgtagtccagaagttgtaaattagtggtctatgctgttatttggttcataatgatgattttttttttttttcgagacagggtcttgctttgtagcccagattggagtgcagtggcacgatctcagctgcctgcagccttgaacttctgggctgaagcaatcctctgcctcagcctcccaagtagctggaaccacaggcacacatcaccatgcctggctaatgttttgatttttttttttttttgtagaagcgaggcctcaccatgttgctcaggctggtctccaactcctgggctcaagcgatcctccaacgtcagcctctcaaagtgctgggattacaggcatgaaccaccatgcctggccatagtaatgatttatggttagaatatttcttaaaggtaattgaattagttgaaagcacttaaataccagacaatatctcactaagagaaagaaagaaaaaggctagatttctgctttcttttgaaaaatcagattggccttgctgggcagagtcagtcagtctgaacatcagtcttcctcttaaaacaagcctgagctttcctgtctgcctgccagcatgctgcaggtcacccacagggctgaactgtccccctgtactgcccactcggctaaccattgcctcctcccctcctaggtgtgctgatgtatcgggactaccccctggaactattcatggcccagtgctatggcaacatcagtgacttgggcaaggggcgccagatgcctgtccactacggctgcaaggaacgccacttcgtcactatctcctctccactggccacgcagatccctcagggtgaggatgcatgccctgtaccttgcacatgtgcagaccaatgtcacacccctgtccaggcctcagctcttttgcctgccttctgggtggaattctgggttggtgacaccactagagccctggtctgtgctccagacttcttcttcttatttttttcttttttgagacggagtcttgcactgttgcccaggctagagtgcagtggtgctatcgcagctcactgcagcctccttctcccagcttcaagcaattctcctgcctcagcctcccgattagctgagactacaggtgtgcaccaccacgcccagctaatttttgtatttttaatagagacagggtttcaccgtgttggccaggctggtctcaaactcccggcctcaggtgatccacccgcctcagcctctcaaagtgctgggattacaggcgtttaagccattgtgcccagcccactttttttttttttttttttttttttttttttttggtctgagacggggtttcactctcgtcagccaggttggagtgcaatggtgcaatctcggctcactgtaacctccacctcccaggctcaagtgattctcctgccttagcctcctgagtagctgggattatgggcatatgccattgtgcttggctaaatttttgtattttttgtagagataaggtttcaccattttggccaggctggtcttgaacctgagttcaagtgatctgcccaccttggcctctcaaagtgctgggattacagatgtgagccactgcacctggcctgtgttccagactttgaatgcacctcttgtctgggacccttcagaagagggctctgttgctgtccccaccccattcaggggcctgaagcctgtgtgaccacactctggatttcccaaccacatgcctactgcatttgtctgctcacaaacatagccaacgtgtgcaccaggttccactgtgccaatgcttcacgttcatcatctaataaggaccctcattgtggccatggggacagaggttattatttgctcttgttcctgttttcaagagcaggatgcccgtgttttgtgtgtgtgtgagagacagcaagtgaatgggaaaaaaaaaagtgcaggagcctggccaacatggcaaagccctgtccctactaaacatacaaaaattagcttggcatggtggtgcacacctgtaatcctagctactcaggaggctgaagcaggaggattgcttgaacctgggaggcagagtttgcagtgagctgagatcgtgccattgcactctagccaaagtgagatcctgtctcaaaaaaaaaaaaaaggaaattgaagtcaaagagggaagtcactcgctaacggtcatgtggcacagagggagaggagcagggactcaagtcattgactgtgtacctccagagcctgggttcttggccctgacctttgtctgcctcagtcctcagagtcaagtaagcttccccaaagcttaccgtaggtgccctgaagtcccttcccttataagagcttttttgggaagcaaacccactgggtgccaggcctgcaccctcatagtgtggagaacaaggaatcggagccccttcctgtcctccggggcctgtagcctgatctagggttggtctgggccctggcttctttgccctagggcagctgagatgcatgagtttgtgtctctccaggcctcagcactgtgcccagcacagcaggaggctccacaccccttagctcatagtgttcttttgttgaggaacaagaagcagtttgagcctcttaggtgggaggtgggcagggaagctttctcagaggagggggcatttagggggcatttgagctaaaggtaatagggtttccacaaggctggggcgtggccctaaccttccctctgggtccctgctaagtcacttcaaatacacgaagttcctgccatgtgccggtgccactccaagtgcagggaacaaaagcaacgcaaacctcagccctcctggtgctgccattgtggtgggggagacggacagtaacagagatggagagggaactcctggagtatatgagggtgggggtcctgtagggagcagccaagccagccgggtgtggtgcactgtaggggtggctggggtccgtcactggagtgacactgaagtatggaccagaggatgtgaggggggagctgtgtggtgtcttgaggcaggtgtgagcctggcgtgtttgaggagctgggaggagcccagaggggcaggtgtggagtgagcaggtgtggagtgagcgggtgtagggtgagcaggtgtggggtggttggaggtaaagtccaggaggtggtgggtgggggtgcagatggtgcaggttgggtggggcctcaaggcctttgcctgttgcagggatgtcgacttttactcaaagtgggacaggagccgtgggtggggaggagtctgctcttccttggcctggctcacctcttcatggaatccgcgggctgccctgtggataagggattgggcagtgtgtgaagggctagtaaggaggctgctcagtaacttgggcttgaccagggtggtgcagaggaggaggtaagaggggttaggttctgaaggtggagtagatgtggagaatggcgggaagtttggcttggagatgatactggactcttcagcctgagcagttggaagggtggagttgctttcagctgagcaagaggagacctgggtgggcagatgctggggggcatcaggagctgaggtgtttcctttccccttgaagcctggtgactgctggcctgagccacgcttgagccgtgggtcatgtgagtgtgaatgagtgtgagtgcatgtgagtctccgcccctgctcaccaccctctcatcccctgcagcggtgggggcggcgtacgcagccaagcgggccaatgccaacagggtcgtcatctgttacttcggcgagggggcagccagtgagggggacgcccatgccggcttcaacttcgctgccacacttgagtgccccatcatcttcttctgccggaacaatggctacgccatctccacgcccacctctgagcagtatcgcggcgatggcattggtatgggctctgctggctgctccccaccccgctgggatcatctccttccctccccaatcctgccaccttcctgccacccctaccctccttcctggttctcgtcctgtgtcctgtggcgtctggcacttggtcagccacaggagttgaggtcctgagcactcagccttgctctctgtcctctccctgctcgtccccttggcctcgtgcatgttccttatctcagccctggcctgacctgccttctctgtgtccccacagcagcacgaggccccgggtatggcatcatgtcaatccgcgtggatggtaatgatgtgtttgccgtatacaacgccacaaaggaggcccgacggcgggctgtggcagagaaccagcccttcctcatcgaggccatgacctacaggtgcctgccgctccccccgtcagcacccccacagcactgacagccaccgtagcatcttcctcatatcgatcactgtctccaaaacatggccttatcacctgatgttgcatctcccccttgcctttattccgtttccactcctccttccctagttcatcccccatcctccctcctgacccccactccagggagcccacactgacctggggccccttgcccctgtgcaggatcgggcaccacagcaccagtgacgacagttcagcgtaccgctcggtggatgaggtcaattactgggataaacaggaccaccccatctcccggctgcggcactatctgctgagccaaggctggtgggatgaggagcaggagaaggcctggaggaagcagtcccgcaggaaggtgagggtgccccgcccgggagggtgtgctgggggctgctgcggcctgcagagcttgggaaggatttgtggaacaccgaactgggaggctcagggataaccccagtgatgtctcagatgtggcctgtggagccaggctgctggggccatgtgtgtcctggctctgtgtccttggcatgttgccctccacttccttgtctttgaaaggggatgctggtggtgcccatttcagaaactggtttgagactgggcatggtggctcacacctgtaatcccagcactttgggaggccgaggtggcagatcacttgaggtcaggagcttgagaacagcctggccaaacatggtcaagccctgtctctactaaaaatacaaaaattagggctgggcgcagtggctcacgcctgtaatcccagcactttgggaggccaaggcggacagatcacctgaggtcgggagtttgagaccagcctggccaacatggtgaaacctcgtctctaataaaaatacaaaaattagccgggcatggtgccgggtgcctgtaatcccagctacttgggaggccgaggcaggagaattgcttgaacctgggaggtagaggttgcagtgagctgagatcgtaccattgcactccagcctgggcaacgagagcaagactccatctcaaaaaaaaaaattagccaggcgtggtggtgcgtgcctgtagtcccagctactcaggaaggtgaggcagaagaatcgcttgaacccgggaggtggaacttgcagtgattggagatggcgccactgcactccagcctgggcaacagagcaagactatctcttaaaaaaaaaaaaaagctggtttgaggattaggtggcaaaccgtggtggagtgtacatgccctgcccagagtcagtgtgccaccctccctggcccggtcattaggacccagggcccgtgcagcccagtggtgagggcagcacccggcatagggcagcaccgtgtgtcctgtccctgcccttctctgtgcctcagtttcctcattgcttagctgtctacctcttagggctgctgaaagccttaaatgattccacacacttggatagcacctgatccctgctgggatttgagggttttcattacacttctgctaggataatcatttccattgtcgaggtgggaacacaaaggcttggagtggttaattccttgccaaggccccgcaggaggaagcagggtcctgcatgggaggccggctagcctgcccactgccccatgtccccacaggtgatggaggcctttgagcaggccgagcggaagcccaaacccaaccccaacctactcttctcagacgtgtatcaggagatgcccgcccagctccgcaagcagcaggagtctctggcccgccacctgcagacctacggggagcactacccactggatcacttcgataagtgagacctgctcagcccacccccacccatcctcagctaccccgagaggtagccccactctaaggggagcagggggacctgacagcacaccactgtcttccccagtcagctccctctaaaatactcagcggccagggcggctgccactcttcacccctgctcctcccggctgttacattgtcaggggacagcatctgcagcagttgctgaggctccgtcagccccctcttcacctgttgttacagtgccttctcccaggggctgggtgagggcacattcaggactagaagcccctctgggcatggggtggacatggcaggtcagcctgtggaacttgcgcaggtgcgagtggccagcagaggtcacgaataaactgcatctctgcgcctggctctctaccacctctggtctttgtttcctggagtttgggggtgatttgaggccacccccagcttctccaccttagataaataaggtcaaggctcttgagatacctacttcccccggaagcttgcgcaagctggaaggttaacttcagcagacaggatgggggtgggggggtcctccagagatggtctcctgctctctcacagaatgggagaagcctgctgtccagcagagtgatggggagcccagtggagctagccctgcccagcaggggtgcaggggagcgtccaggatgaaggtcagggtgtggccaagccctgctccccaccactccagggccccacagatgcaaaaacaaccccaggcctcagagtggggagtgcatgtttttcaaaaacaaaaagtaggcaaaaacagtccaccaccccatctttcctgcccaggcccctggctgggggaggccaaggagtggcttaagttgtccagcttctgggccctcctccctcccatcaagacctggaaggaggggctgagccaggggccggccccagaggcccaggccaggtcagcacctccgccctccccaatgagagtcagcactggagccttgggtcttgcagttgtttccagagccgaatgctggcctgggggcccaggggccgtaccagcagcaggttgcggaaagcacagtggtccgcagtgcggtctgctggccaggctgtgaggaagcctgggtgggcctggggcaccaggcccagggctcggatgcaaaggccagtgtagacgtcctcaaaggggaagggtgccacacgggctgccgcccgcagcagccagggtgccaggcgcccggcaatgacgtagccacccccgcttgcataggctgggtagccaccttcgaagaaggactcgggcacatagaagggtcctcctggcttccggagaggcatggcctgggtaaagacctcacccaggtagaggcttcgggccgaggcaggtggcagggcccgcaggtgagccagcagggcaggggtgtgtacaaaggcatcgtcctgagctcgcaagacaaaactcacggtggggcagtggcggcccagccaggccagcagcagcaggtctttgagcgtctggttgaatgggacgtcgaggaagtcccagagcagcaggtcactgtagcgacggctctcccaggccactagtgagtctaggtcaggccccgcctcacccaccggagaccctagcaggaagagcagccggatccctggagctggactgccccacgtctctctcacggcctgtcgttctgcaaagcgccctggttctgacttgacggccaacagcaggtaggggacatcagtatctgagcagctggagacttggctgccaccacctccaggcagccactgtgggaagctccggcaggctgctgacagcaagaagcggcggaggtccttggggtaggaggcgaagtcagggatctcggtggcggcggcggccccccaagcctggcagccccccgtttcagtgctgtccccactgggcagggaccccagccgccactgctgctggttccagtaagcaaagggcagcgggatagtctggcccaggcgggtggagaggttggcaggtagggtgggctcagggttggctggcgtggggcttggcggggtgccccgagggctggggtaggccttgctgagccgggactcggatgtccactcgatgtacactttgaggcccaggagtgtgagcagtgctgacaggcagagaaggcacttggggcagcgcatgacccggcccagggaaggggcggccgcgggagctacaagggagccacaggggagccacggaggccattggggtgtggggatgggcctccagagagggcccagccaggccccaggcagacagcttcacaatctcccatagtccccgccaacccccataacagattctctcggtcccagatcctaaacagctcccctgacccagggacctcgttggtccttattcctagacctaggagtcccccattccaatcccgtaccagcaccctgttcttcccactccgtccaaatgcttccaccttcctaaaagcccaagggtctacctcttccctgtctccatccaggacaagggaccttgccgtctatctcctccctctccctccatttattgccctcaccaggaaatcaggagcgggattcctagctccctggggttagaaacccagcctgcctcccgcaacaccccaaccccagggactggggaaccagggatcccatgcttttttacctctgggtctggctcccgccagctccgggtgccggcctcaggtcaggcctccctcagctccctctgatctgcctgccccagcccctgtgttgtcgaccggcggggcccagccctgcccagccagtccagaggggcggggaggggagtggagcgggagcagggagggccccaggggccggggcggggctgaggcaggagagagggagggagggagggagggaggagggcaggaggccgacctgagagatggggctctggcgtgttagggctggtttctggtgagacagctgggaagggtgcagggggcagccacagaaacaagacgggggctttgtgaggcctgggaggggagaaccagggccagggggtgccagggagggtggggctgaaggctgggcctgggctggggagtgttagagtgaccagggcgaggcagggtcccactgaggcagagatggggaggctgagaggctggcgcccggctgcacccatggccaggaggcggcagtgaatgtgctgagtgggaagggatcggcgggcctgccagagggatgtttgttgttgctgcccagtcagggtgaggtggggggaacggggctggtgaggagaaggagagacagagacattgtggagagggaagagacggccagggagcagagagaggagaactggggtgagacaggcgatggagagagctgagggggagagagagagaagacgggcaagtgggaaggtggccaggagggagagggggagggaaatggagatggcgagaaagataaggggttgcggaagccctgtggggtgctcatggggaaagagaggttgagagaggcaggtggagggcagaggggagggactcaggcttccgagccagacccaggcagaggcggagagggagccaaggggaagaacaggagaggaaaagactggagcttcaagggcaatagagggtgacggggtggggcccacggggaaccccgggagctaagctgatcccctgtacctcctccatccctctcggcacccgggctgcctgcccagcagcgtgggaatctgttcctaccttacccccaacctccggcctggagccagcctcaccccgggcccctcccctcccccagcggcactgtgactccaggaacactcacatccagccccttggggcaggagggggtgtctgcctgtgtttgcatccctgccctccaggggcccctgctgttgggactgcatcagctctctgaagacctcccaagacatggggtaagactaaggggctcccactaagcctgggctgaccccttcactccaccctggtttggggcaggcctgtccccatcatggcaggaacacagtctgtcagcagcagcagttgatgatctgtccagccctgatttcctcccccaaagtttgaataatggagcctgtgggaacagctggaggaagagagtggggaggaagtggtgaatattaatggaataatagttggagtgggaaatgacagctaggggctgggggcaggggcccgagcacctcctgagggagtctgcaagcccactccactctggggctgggggagagggactccaggccccctgagctcatctagcttctgggggcagggggtgctgctcctcctggaagcattaggaagcttcacaaggtgcctttctttttgcctttgccatgtgcctcagtccgggtccaatcaggagagagaaaccacacaggaatgggaatagggaaagttcaatatacagaatgattaactctcatgggattggccactaaggggtgccttcttggggaacatggttggagggtggacatgctggtggaacacgatcattccaatccaacacttctgtctccccaagccttgggactcccctcacccatcttatgctagggcagttctggtctctctgcctcattaactttaggccactgttggatccaagttccggttaggcacccaagcaagctattagaactacgtccagctgcacaaggtaacccatgaaatccagaagctctagaaagcgcactcatgccagtaaatttggcctgagctagtgttacatccaccctcattggtgtaacatccttaaaatccccttctgcacacattccccaagtttctgactctgtatatttgcgaagccttgtcattcttatagtgtaaaagctgctcccgcctaggtcctagctggcacctgttcacctggagcaagctgatttcaccctaggtatttatgggtctagaggcagcaaggggcgctgtggtgagtcttaagaagaatggggtgtatctgttatttctgtataagagctggccataagaaaaaaaaaactgtggtgggacagtggctcacccctgtaatcccaatactctgggaggccaagagggaaggatcactttccaggagttcaagaccagcctgggcaacatagtgagatcttaccgctaatcaaaaaaaaaaaaaaaaaaaaaaggacgaccactttcaaggtgtctgcccctggtgaggtcatcacaaggttttttttttgagacggagtctcactctgtcacccaggttggagtgcagtggcatgatctccgctcactgcaagcctcacctcccaggttcacgccattctcctgcctcagcctctcaagtagctgggactacagacgcccgccaccatgcccggctaatgtttttgtatttttagtagagacagggtttcactatttctactaaagtagagtacttaggcaggatggtcttcatctcctgaccttgtgatccacccgcctcggcctcccaaagtgctgggattacaggcatgaggcactgcacccggcctctgtttttttttttgagatggagtcttgcactgtcgccaaggctggtgtgcagtggtgcaatctcggctcactgcaacctctccgcctcctgggttcaagagatcctcctactcgggagggttcagccttccgagtaactaggattacaggtgctcgccaccacgcctggctaattttttgcatttttagtagagatggggttttactatgttggccaggctggttttgaactcctgacctcatgatccgcctgccttggcctcccaaagtgctgggattacaggcgtgagccaccgtgcctggccacatcacaaggtttctaagcacaggaaggctggtaggttcctcagatgctgataagtcactcgcttggagtgacttgggggttcaagatcgcctgtttactctgggtccaattagatgaccccattccaaagaagtaaaaacttttgggccgggcatggtggctcacacctgtaatcccagcactttgggaggctgaggtgggtggatcacctgaggccaggagtttgagaccagcatggccaacatggcaaaaccctgtctctactaaaaacacaaaaattcgcctggcgtggtggtacacgcctgtaatcccagctactcggtaagctaaggcaggaaaatcgcttgaacccgggaggtggaggttgcagtgagccgagagatcacactactgcactccagcctgggtgacatagcaagactgtctcaaaaacaaacaaacaaaaaatctgggggctgtcatgaaagctgtctagttctcagactgtgacttgagctgagttagcggacccaagcttgtcactgtctgtgggcactcaagggcactctggagaatccatccaataccctggtcttcagaattggcacaactagcacagctgttgagcacagcagccacagggggtcccaaggcacgtgcttcagttggtccctcatctccgtcaaccacaggcacttgtgggattatgatgccattgcatgccatgggcctctggcatcctgtttcccatcagcaagagctcagcgcggcgcccaagcccaaaggcacaaccaaaccaatcctggaatcctatcttaagagtcatctcctgggacactccaggtatcaactctatatccatcaggatgcagtcaggagagaaaaaccacagagtaacttgaacagggaaagtttaatatagagaattactggctttaacagtgaactggaataatgagggcttcactggtaaaatgcttctgaattgactggaaatccatttggggtgctggggaacgttattcccagagaggtgcctcagtggaggcgctgtgtctcctacgcaacttctgagggctggagggtgccaagggcagctgctgaccgcctggtgcttcaggagctgggtgctggggaagccacatgcactgcggcgtccagaggcagaagcacaaccaacaagaaccacgaaggaggcgcctttcctcctataatgcctgtttggtgccctctactgacaaagcttatcccctttcaaaaaacagccaactgaaaaagctgaatttggaacataaagtcaataaatccataaccagcaatactatggggcctggggtgcgctggcctttagtgagtggagtggggcgaaggatgctgcatgtcctgcagtgggcacagcggccctgcacgggggagaaccatccctgtaaagtgtcagtagtagcccctgtgtcagtcagggtccctgcaagaaatggcagtgcactcacataaggacagtttgagaagagtctcctgacaaggtgagtgtggctctctgcggctactaacagcctgagcctttacctccccaggcctgaacaggggcatggaaagggctgcctgacagggtgacaggagctgtgacctttagccaagggcagccaggaataaatactgggaactcacgctctctcctgtgattggccagcaccactcccccaccctgacgttgagtgaagacaaatggaagccagaagtgtggtgagctaccagacattccatgcagcccgctgagaagccacgtgagtggggacagggctaaaggctaggcagggacagggctggctgtgtcccgaggctgctcctccggccctgacttcaggccctcagcccagtcgactcccacaacctcgcaattgggcagcatctcctccaccaatatctgagtgaggccagggttggacacggcagggaggtccgagatgtccagcctgcggaggttcctgaaaaggggtgagaaggacaggaagccagtgtaaggacagcatgtgtgtgtgtgtagggaggtacaggacagcgtgtgcgtgtgtgtgtgtgtataggcaggtaagccagtgtaaggacagcgtgtgtgtgtatagggaggtacaggacagtgtgtgcgtgtgtgtgtgtgtgtgtgtatagggaggtaagccagtgtaaggacagcatgtgtgtgtgtgtgtgtagggaggtacaggacagcgtgtgtgtgtgtgtgtgtgtgtgtatagggagataagccagtataaggacagcgtgtgtgtgtgtgtgtgtgtgtgtagggaggtacagacagcgtgtgcgtgtgtgtagggaggtacaggacagcgtgcgtgtgtgtgtgtgtgtgtgtgtgtgtgtgtgtgtagggaggtactggccccaaatttcaaccttacaggacagtgtgtgtgcgtgcgtgtgtgtgtgtgcgtgcgtgcatgcgtgcatgtgtgtgtgtatagggaggtactggccccaaatttcaaccttagcttcctaaaataaaatctttatagctgtccaggcacatgaagcccactgtgttaattgcaaatatgcaactccagctcctgctgttctgcaacagcgtcgatatcacacagttttgactaaaacaaaaaggaagaaaaccaggagtcatttaattcttccagagactcactgtgactgctcatctaccataaatactctaggtttgtgatggatgcagggggatatgagaactgcctaacattgcccctccccacttcctctcctgcatctgggttaggtgggagaggtgcctgggcatgtggcccagcctgagctgaggtctcactggaggtggtggaggcaggcgaggccccgttcggagatgcgggggcaaccggccagcgagagctcctgcaacgagtcggccagtgggtagaggcggctgagacaccagtcgtccacgtggcagcagcgctgcagcgacaaggactggagctccttcaggcggactgcggtggggagagggtgggatggcaccaggagcctttctggagcccatcaccaaagggaaaacatagaggcctgtcccatctccaccccaccgcactcacggaggttatccaggccctcgtagttgatgtcacagtcaccggcatccacagcttcgacaggcacttcacagaaattccagaactcctgagagaaatggccatacttatctggcctgatccactccttgtctcgaaacctggaaacgggaaagggagtgtcagcagggcacctgaacctgccccaggcctccagcctcttcagaaccttccccagccctatataatatgtataggtcacccttgacataactaattccatcttagaaaaagactccatctggctgtgcgcagtggctcacgcctgtaatcccagcactttgggaggctgaggcaggagaatcacttgagttcaggagtttgagaccagcctgggcaacatagtgagacctcgtccctatgaaaaaatacaaaaattggccaggtgcggtggctcacgcctgtaatcccagcactttgggagccgaggtgggcggactacgaggtcaggagatcgaaaccatcctggctaatacacggtgaaaccccatctctactaaaaatacaaaaaaattagctgagcatggtggcaggcgcctgtactcccagcttcttgggaggctgaggcaggagaattgtttgaacctgggaggcggagcttgcagtgagccgagatcgtgccactgcactccagcctgggtgacagagcgagactccatctcaaaaaaaaaacaaaaaaacaaaaattagctgggcttggtggcttgcacctgtggtctcagctacttgggaggctgaggtgggaggatagcttgaacccaggaggtcgaggctgtagtgagttgtgatcatgccactgtgctccagcctgggagaccctatctcaaaaaaaaaaaaaaaaaaaaaggaatgttttgccaattttacatacctagaaactgagggtcagcgagattacagataacataagagcaaagaggtaaaatgcaagaatccttgtagatgggcagaagttaagggacattttcaaacatgtatactgtttctaaggaagttgccagaggaagtgctcaaaccagatggaggggtagatgaagtctatgtgaactgtcttttccaaaaaaagaaaaaaagcaaaggaaagagaaagggaaggagaaaggaggcggggaagaaggaaagaaagaaaaacattattgagcacaggccaggcgccaccagtggctcacgcctgtaatccccagcactttgggaggccgaggtgggtggatcacttgaggtcaggggttggagaccagcctggccaacatggtaaaaccctgtctctaccaaaaataaaaaaaattagccgggcgtggtagtgtgcacctataatcccaggtacttgggaggctgaggcaggagaattgcttgaacccaggagatggaggttgcagtgagccgagattgtgccactgcactctagcctgggcgacaagagcaagactcttgtctcaaaaaaaaaaaaaaattattgagcacatatgcattgctaggcttcttacattgcaaaatcacagttaatctctcactccccctgacagggtcccactgggtagctgggattacaggcatgcaccaccatgcctgggtaattttgtattttggtagagacgaggtttcactatgttgccgaggctggtcttgaactcctgggctcaagtgctgtacctgccttggcctctcaaagtgcaaaggcatgagctaccacgcccagccattattattattattttgagacagagtcttgctctgtcacccaggctggagtgcagtggcgtgatcttggctcattgcaacctctgcatcccggcttctaagggattctcctgcctcagcctcctaagtagctggcattacaggcgtgcgccaccatgccaagctaattttgtatttttagtggagacagggtttcaccacgttggctaggctggtctcgaactcctgacctcagatgatccaccagcctcggcctcccaaagtgctgcgattacaggtgtgagccaccgcgcccggcctattattattttttgtgatgaggtctccctgtgttgcccaggctagagttcagtggtgtgactacagctcactgtagcctcctggactgaagcgattctcccgccttagcctcctgagtggctgggaccacaggcatgtgccaccatacctggctaatttaaaacattttttgtagagacagggtctcacaaagctgctgaggctgttctcaaactcctggcctccagtgaccttcctgtctcggcctcccaaagtgctgggattacagaatgagccagtgtgcccagctccgttcagtctttttttttttttttgacacttttgagatggagtcttgccctgtcccccaggctggagtgcagtggtgcaatctcagctcactgcaacctccacctcccgggttcatgcgattctcctgcctcagcctccccagtagctgggattacaggcgcctgccaccacgcccagctaagttttgtatttttagtagagacagggtttcgccattttggccaagctgctctcgaactcctgacctcaggtgatccgcccgccttggcctcccaaagcattgggattacaggcgtgagccaccgtgcccggcccctgttcactctttatagcaaaccttgtgggttagaaatgaccaccatcccattttacacgtgacaaaactgaagctcaggaacaagtcccaagccacacagccaggaggcggcagagaccaggggactctgaagcctgtgtgactgcagaacctggatgttagagagataccccaccacctgccccagcccgttctaacaccttagcggtcatacttgactgcgcctccctgcttcaggatgaaaaaggcacctgcgccgtatggaccatgttgcttctccagccaggtgtaagatctgcagagaaaatggtagctaagggtgaggcctggggagcaccacagccctcacgatgccccagtgctgttaagaggggcagagtccagagaaccaggcacacagacagattcagtcaggctgaaaatatttattgcccacctcctaagtgctgggcactgggggcaaagtggtgaccaaggcagataacatccctgcccagtctggagattactgcagtaatccaagctattatacagggagaaacagataacaacccaggaaataacagcaaactgcagagaatgtcaattccatgaccaaacaaagcagagaggctgactgtgagggctagggagcagaggagtggggatggtggaggctaactgagtttgggtgttaattggaggaggtgacatttgagcagggatttgagtggtgagaaggaacagagtataaaggctcagagacttgaattaggatggttgaataaataagaaatagggatgtcatgctgaaggggccagtggagtcctgatagggggtctcaaagctcagtaggagctatgttttaggccttggagattggctcttatttgaaggttttgagctggtgatgataagattccttcagctgctttgtagattataaaaaactatgggacaggccaggtgtggtggctcacgcctgtaatcccagcactttggaaggccgaggcaggtggatcatctgaggtcaggatttcgagaccagcctggccaacatggtgaaaccccatctctactaaaaatagaaaaattaggtgtggtggcgcctgcctgtaatctcacctacttgggaggctgaggcgggagaatcgcttgaacccaggaggtggagattgcaatgagccatgatcacaccactgtactccagcatgtgcgacagagtgagactctgtctcaaacaaaacaaaacaaattttggcggggtgtggtggctcatgcctgtaatcccagcactctgggagaccgaggcaggcggatcacctgaggtcaggagttcgagagcagcctcgctaacatggtgaaaacccatctctactaaaaatacaaaaattagctgggcctggtggcgggcgcctgtaatcccagctacttgggaggcggaggcaggagaattgcttgaacctgggaggtggaggttgcagtgagcttagattgcgccactacactccaggctgggagacagagcaagactccatctcagaaaaaaaaaaaaaagagtatgggaacaaaaacccagttagcttattgagtgattcaactataagggatcaggctacgaatggtgaaggcagtgagaactggtcaaatctgagatattctagtattttattgatggtctggatgtggagggcagggaagcaaagagaggaattagggatgactccttagaatttggcctgaacaactgggtgggcagcaccagtgtttactgggatgggaaggcttgggagtgagcagatgtttttaggggagaaatcagggtttggctttagccatgttaggtttgagatgccagttagactctgagtggagctggtgggtggcaaactgcctatgtgagctggagtccttgagaagggtacagcctggagatggagctgcaagagacatcaaggctggcactggaagccacagtgctgcctgggaatggcaaggacaggacctgggctctggtgggccagggtctccacagggtcttgcagaccagggattctcaccgatttttctcatgcaccttgtacatctccctttggagcaagtaatccctcagagcctccacatcgtagaaatagttggtcaggaactggagtattgtccttttcttcttctgattgccctctggggccactgccgcacccaggcgatggatgcccctgatacgcccattccacatgggggcgaccaggcgcagggactggggagggggagaggaaaggagctgagcctggagcctcctgggagacacagagctggatcccccagttcttgctccatgaacctcaatccctctgcttcccaactcaccctaagttcttccttcaaaacttcaaaactgtctttgagattccaaaaatttccccatgttttttccaagttcctcctccccttagtgaaccctaaattttctcgactagccatatattgttgattttcctaaattcttcctctaactttcccccaaacccttatcactcaaaacctgcattatttgacctcttaattttccacagatttgccccttaattacccaattcttctgctggggtcttcccaaatgacttctttctttccccagaatataatcttaaaaacttatctccaaacctcaaggagagggtgctctgagcaatccctaaaaccaaccaagcttgtccaacccgccgcctgcatgcagcccaacacaaacatgcaaactttcttaaaacattaggaggatatttttgtgatttttttttttttttttttggctcatcagttatggttagtgtattttatgtgtggcccaagacaattcttcttcttcgaacagcgtggcccagggaagccaaaagattggacacccctgaaccgagaagggtataaaaagcatgagctttgaagaggagagtaagaaagtcgaggggtgtggccaatgggaagaagcccccaaactcttcaattttgctttcaaggtctcctcttaatctaccccaatttctctttgctttaaccaaattctttttttttttcaaattatctcgataattttacccaaacccttattttcctcaaaagtttaaagctgccaacctctttaattttccctaaattcattccttgattttaaatcctctgaaagaatatctcaaattctcctcttaatttcacccagatcatgcccttagaacctccaaattgacctcttggttcccccacccatcatgcttttgagttttctgtaaaaattcgtcaatctcccactaactttccttacattcatccttcggtcttctaagaccaaatcccacatcctcgaacaatcccttccaagctctcttatcctacaggccccacccttgcctgtccattagctccttgtgtcatccctccctctgattggttagtcgcgtcgctcttcggcagccactccctcatccccattggatactctcagccaagtccctgcctcctctcgctcgctaaagcgtctcctccgcctgcgaccctcacagatccttcctggcccccactagccacaggtttgcactcccagtacggggcttgccaggcttagcctgctgcctcacggctttctgctctcgtggccgccaacagaggccctgaatgcggaggctgtagagcggacttcaaatttggggctctaggaactccggtcacttaccgcccagggagccgccatcttgctaaggtttcgtaaccggaaggggccggtcttatcccacgctcctggttcagcgcgaacttattctcctgtggccacgccccgcgttttctaaccgtcctcttaaaggtgcacgcactttttactcttaaagggtttagggattgctcacagcgccctctccctgagcttcaaaacgagacacaggtcgggctcacgcacctgtgaacccagcactttgtggaggccgaggcgaaagcatcgcttgaagccaggagttcgagaccagcctgggcaacataggggagcctttatctccacaaagaaatagggcaaccttatatccacaaaaaataaaatgttagccgggcgtggtggtgcacgcctgtggtcccagctactcacgaggctgaggcggggggatcacttgagccggggaggtcgaagttgcagtgagctgtgattgcgccactgcactccagcctgggtgacagagcgagacgctgtctcttaaaacaaaaaattgaaaaacaaaacaaaccccaggactccacaatctttccctaggagaagatggggtgttcttcccggcagagtacctttctttcctgactgcaattgcagtctccccaagctttcttattcttccagcttccactcactacctcctaaaaacagggaatgagggggctgaaaagctgaccacgtcatttttaaaaattagggtcaggtaagagagtgggtgaagaggttagatgtcaaggttagagactgaggtgagatctcaagaccagtttggagttgaaagctagatcgcagcatgaagagccattgtgaagtcttgtggatagaattattcattcattagttccaagaatatttactgagcacctaccacgtgatggcaggcactgttctagatgccgaggttaccatggtgagcaggacagacccagtccctctctcaggaagtcaacattctgggctgggagaggatggatgtgggagaggatgaataagaaacaaaggaatcagcaaggcaattttgatgagaagcagataaaaaaaagtgactgggtgtagggccatcagcaaaggcctctctgaagaggtgacattgaagtagaagtgaatgataaggaaagagccattcaaagatctaggggaaaagcgctgcagggagaggtagcctctagagcagagaggccttgaggtgggaaccagcttgcagacagagataggagactgggttgagaggtgggcaggggctgacggtgcaggcctggtagggttttattctattcacagtgggaagaagggagtgtcaaaatcggatttacattttgtaaagattatttctgccaggtggagaatgtaccttagagcagcggtccctaaccgttttgttaccagggactggtttcgtggaggacaatttttccatagactgggggtcgggggtggggtggggatggttttgggatgaaactgttccacctgagatcatcaggcattagattctcataaggagcaggcaacctagatcccccgcacgcacagttcacaatagggtttgcctcctatgagaatctaatgccactgctgatgtgacaggaggcggagctcaggcggtaatgctcacttacccgctgctcatctcttgctgtgcggcccagttcctagcaggcgaggggctggtactggtccttggcccagggactggggacccttgccttagagggcaagggtggatgcaggggaccagtaaaagaggctgctgtagcagtctaggcaagagatgaatggggatggggcagagggaatggtgagaagtgctcaaatcctgggcctgttttgaaggttaagccaacagattgagaaactaaaagcagacgggcgtggctgtgcacgtgaggaaactggaagggcagcaggtttaggaaggtgggtgtggcagctgaataacgaaccctctccccatacctgtgaatccctgggcactgtgactatgttactttctatggtaaaagggacttggggctgggcgcgttggctcacgcctgtaatcccagcactttgggaggccgaggtgggcagatcacctgaggtcaggggtttgagaccagcctggctaacatggtgaaaccccgtctccactaaacatacaaaaattcgccaggtgtggtggcgtgcacctgtaaccccagctgttcaggaggctgaggcaggggaatcgcttgaacccgggaggcggaggttgcagtgagccaagattgcaccactgcagtccagcctggatgacagagcgagactctgtctcaaaaaacaaaatacatatatatatatattgttcatttgtttattttaagatggagtcttgctctgtcgccaggctggaatgcagtggcgtgatcttggcttactgcaacctccacctcctgggttcacaccattctcctgcctcagcctcccgagtagctgggactacaggcacgcggcagcatgcccggctaattttttgtgttttactagagacggggtttcaccatgtggccaggatggtcttgatctcctgacctcgtgatctaccattatatatatgtatatatatgcaccttgggtctgaaggaagggtccaaggccgagagaggcctgcagtgcttcccagacttttccacagcagaagccctcaccctcaacagggataatatacccataggcaagtccagggtcagcagaattggctgcttggccctaggccagcagcctggacacaggcactccagctaagggattgctgtcttggtgcccctgggagccattcctgcccccaaaggcacactggtgggaaagccctaggatgacccgtgccaagaggacaagcaaggaccaagctatgggcaagccagaggtcaaatggaggctgaggagaggctggagaagtggtggtggggggcaggtggaaggacagagggtgccaggcatctacagacactgagcgcccctgaggggtcaggcctgagacaggcagggaagggtggagttagacctctgcaagaggctatgtttgaaccctgtgagcagagttgaggttagacttcagaaggaaaaagaaaagcacaaggccagctgattctctctgaagagtggactttgggatacctttcccaggaacccccatcccactccctctgccctttactctccaccacgcacacagctccccaggggaccaggccaccctggaccttgctacttcctgctccttgcagccatagctcagagacgatggaactgtggaggcagctgaatcaggctggactggtgcctccggggctgggcccacccccccaggccctgagggaggtctccccagtggaaatccctggtcagaccctcaggactgcaggggcagacactggaggtgcctgcgatagtctgctgtggatcagggaggagctggtgagtgaggggtttggaagggaaagagaaagagaggaaatgagaatgaatggaaatgaacaaaaatagagaaggccagagatcgaaaaacagaatctgagagatagaagcagagacatgagaggcatgtacagacaccgagagacagacatagagtgagggacgggaacagaggtggggacagggagatcccaaaagagagggacagaggtgggaagcagagacggagagcaggaacagagatggagagacagactgaatttgagaaagttggggagggcagagagagggcaagcgagagaaagagagccaaaggcaggggcagagaaatggcaacacataaagacagagagacaggggcatggaaagacaaaaaataaatggggacagagacaaagggaaacagggacagatatagataagagagggaggagacagagagagagaagtcagggacaatgaaatggagagacaaagagaagagttagagatcaagagacactctgagaagcaggaaggcagttagggtccatgggcacagtgaggaccctgcccaggcgctgtggccaggacatgagttgggacctgctctcacccaggtcctggagagaccccttgctctctggggtggcatccctgtgacgtccccttcctactggcaggggaacctgcgccgagtggatgtccagctgctgggacagctgtgcagcctggggctggagatgggggcgctgcgggaggaactggtcaccatattggaggaggaggaggagagcagcaaggaagaggaggaggatcaagagccccagaggaagcaggaggaggaacacctggaggcctgcccagccccacatccacctgactttgagatgatgatctgaggctctgccagtggatttagattgacatacaaatgagatgcaaatgtatgtaaaggagaagggagatttgcaggtcaaagcagatgtggaatcaagtatacccctttagtaagtgctttctctgaaggtgcctgcaatgatatttaggcattggcctgtgagctatgggtgtgtttgcagatgacatgaggatgtgtttggaggtgatgtgggaggttgtagagaagttgcaggtgctttcgcagatgagcctcaggtgtgctgctgagatggggatctctgcaaatatgctggtgatgcatacagatgcgatttcagatcaacgctgtccagtatggtagccaccggacacacatggttatttagtgcttgaaacatggggactgcaaattgagatgtgctgtgagtgtaaaatacacaccaaatattaaaggcttagtatgatgaaaagaacataagacatctcaataatttttagattacttattgaaataataatattttgagcatatcagtattagtaaaaatattactaaaattattttcacctgtttctaaattttgtttgtgtgtattgttcccctccctgtgtccatatgttctcattcttttttttttttttttgagacggagtctcactctgttgcccaggctggagtgcagtggcgtgatctcggctcattgcaacctccatctcctgggttcaagccattctcctgcctcagcctcctgagtagctgggattacaggctcacgccaccacacggaactaatttttgtatttttagtagagacggggtttcaccatattggtcaggctggtctcgaacttctgacctcgtgatccactcgcctcagcttcccaaagtgctgggattacaggcatgagccacctcgcccagcctcattgttgtgttacaaagcactttctgttggaagtgagagtcttttcagagaagtgaaatgttgacagaggaggtgctgattcctttccacgggagttttctccttaaaaataagccgcttccactttgggaggccgaggctgggaaatcacttgaggtcaggagtttcagaccagcctggccaacatggtgaaaccctgtctctactaaaaatacaaaaattagctgggtgtggtggcacgcgcctgtaatcccagctactggggaggctgcggcacaagaatcacttgaacccgggaggcggaggctgcagtgagctgagatcacgccactgcactccaacctgggagacagagagatactctatctcaaaaacaataacaacgaaaaaccaagctgcttcgttttgtccagtggagaccccaggattagggtggggtacaggactggggtttaggggttcaggctccatccccagcctggtcctcattagctaacctgagccaggtctgcagctggtgtcagtgctgctgtttgggggttggggagaacgttgaagtcacgcctagcagccagggaagggggaaggacaccccacaaagcatgcaagcggcagggcattctctctctgtcttggcactctagacagaggcccggggagtctgggggtctcttggcagctacatctagacagtaggggtcatggggaatgaggatgttggatgccatggccccagggtctgggtcatgcttcacaagtgccagggtcctctgtctcttggggagaaagagatgaggggggtacaagtgagaggctggtggggcgacttgtaacaggtgctcactattcaagaacagcatgaggccgggcgcgatggctcacgcctgtaatcccagcactttgggaggccgaggcgggcggatcacgaggtcaggagatcgagaccatcctgactaacacggtgaaaccccgtctcaactaaaaatacaaaaaattagccgggtgtggtggcaggctcctgtagtcccagctactcgggaggctgaggcaggagaatggagtgaaccctggaggtggagcttgcagtgagccgagatcgcgccactgcactccagcctgggcaacagagcgagactctgtctcaaaaaaaaaaaaaaaaaaaaaaaaaaggacagcttggaggatggactcgatgtttaaggggagttgccctaatcctatggcctgggccacagaggtgaaatctatggaagagagtgggagtttgggtgaaggggccagcctcacccgtactgtcctcagcaccacactaactgagctccttccagcagtgaccaagtcttttccaggcctgtccttccagatctcccagaccagtgggagaagatacccatccctatccagggacagccaagatggtcagggtggggacagaggaagtataatctgagggatcaaggctgagatgggggaggcacaggaggcggaggggacccagagaaggcaacaggcccaggctgaaatgtcaggaaagtgatcttagaggagaattgaggcaacaaggaaaaatgagccaagtaaagaaagtgaatgaggctgggtgcagtggttcacgcctgtaatcccagcactttgggaggccaaggtgggtggatcacctgaggtcaggagtctgagatcagcctggccaacatggcaaaaccccgtctctactaaaaatacggaaactagccaggcatgggggtgcatctatagtcgcagctactcaggaggctgaggcacaataattgcttgaacccgggaagtggaggttgcagtccgccaagattgcaccactgcactcccacctgggcaacagagtgagactctgtctcaaaaaaaaaaaaaaaaaaagtgaatgaaaaggatataaaagtagaaaaatagcatacacagaagccatggggcttatctagtgatctagccccctgctactcaaagtgcagtcattcatggaatacagcagtaacagcattgttacagctgtctattgctgcataacaaacagcccccagacattgttgtttcaaaacagtgacagcatgcattttgctcacgcatctgcaatctgcagggatccctcatctctgctccacgctgtctgaggcttcagctggaatcattgttggcgcatttgctctcctgtctggcggttgatgctggctgagggctgggggtgcctctgtttctctccctgtcttgtctccacatgggctaagttgggctcccaaggagcttagaggatgggttccaagggcatgtatcctgagagggagccagtcagaagcaacatcgccttgtgtaacccagcctcataagccatgcagggtcactctcaccatgttgatgccatcgtcaagtcctgatcaggttcaaaggaaggggaaatagccgggcgcggtggctcccgcctgtaatcccagcactttgggaggctgaggcgggcggatcacctgaggtcgggagtttgagaccagcctggccgacatggagaaaccccgtctctactaaaaatacaaaattagctgggcgtggtggcacatacctgtaatcccagctactcgggaggctgaggtagaagcattgcttgaacccaggaggcggaggttgcggtgagctgagatcacgccattgcgctccagcctgggcaacaagagtgaaacttcgtctcaaaaaaataaataaaggaaggggaaatggactccaccttttcatgggggagtacaaggttctggaggagcatgtgggaccggaaacattgctgaaatcatcagtggaaaacgcaagttaccccagcagccgcttggtaggtgtgctcactcccagacccatgccagaccaaccaaatcagatgctgtgcatacaagaagagttccacctgctttgtttgcaaattaggtttgagaaatactgttttaaatcacaaatgtgacactgttttgagcaggtggagcagggaaagagtaattacatttagagagctccctctggctgccgcgtggaggttggattagagggctcaagagtggtggtccagtagaaagaaccaaaaaaaaaaaaaaaaaaatggatgaattgaacattatcaaaattccaaacctgtgtacatcaaaaaacactattgaaaatagatggccgggcactgtggctcacacctgtacttccagcacttagggagactgaggctgacagatcgctttgaggcagggagttcaagaccaacctaggcaacatggcgaaacctcggctctactaaaaaatacaaaaattagctgggtgcgatggcaagtgcctataacctcagctactcaggaggctgaagtgggagaattgcttgagcctggcaggtcgagtctgcagtgagccaagatcatgccactgcactccagcctgggtgacagagtgagactgtctcaataaaaaaaaaaagaaaaagaaaataaaaacacaacctatatattaggagaaaatagttgcagaaatatatctgataaggctctagtatctagaatatataaggaacttttacaactcaacaatgtaaagacaaatattaatagttcagttacaaaatgggcaaagaacttgaatagacatttccccaaagaagatgtacaagttattaagccaataagcacatgaaaagatgctcaacatttgtgtcagtagggttcttcagaaaaacagaataaattatatatatagctaagttatacgtataatttaattaagttatgcgtataattatatatataatttattctgtttttctggaggacccaatttatatatataaattggctcatgtaattatggaagctgagaagtctcacgatctgccatttgcacgctggaaatcgggaaagctggtggtgtattcagtccaagtgtgaaggcttcataaccaggagtgcaaatatctgaggtcaggagaagatggatgtctcagctccaaacaaattcccccttttcccctcccctcccctcgcctcccctcttctttttttttttttgagacagagtctcgctctatcgcccagcctggagtgcagtggcgcgatctcggcaacccctccggggttgaagcgattctcgtgtctcagcctctcgagtagctgggattacaggagcgcgccacatgtccagctaatttttctgtattttttagtagaggggatgtttcaccatgttggccaggctggtctcaaactcccgtcctcatgtgatccacccacctcggcctcccaaagtgctggaattacaggcgtgagccacagcgcttagccagaaaattttaaacattacccatgttttggttgtgcttctactgggctcccacctgctgtgatgccctgtctccaccaggtggcgccaacacacccctgcagcccctccagccaaggcagactggacactgaggggcaggacccgactatgaggtcctttgaggaagcaggtccttatagagggcgtcgttgagacaggctattcccacacagggggctcctgttgagagagaaagtccaagttctggtgagcgggagacaggcaggaataatcactcctaaagctacccatgtcacaatccctggaacccgtgaatggtaacttttatggcaaaagggctctgcagttgttaaggatattgaggtggagaaattctcctgggttatgtgggtggccctcaatggaatcccaagtgtgcttgcaagagagagacagagggagccctgaacacagagaaggtgaggatgtgataacagaagtaggagggtgagtggtgtcaggaaggggctggagcgagggatgcagcagcctctagaaggtggagaagcagcacagatgctccctgaggccaccaggtcagtacagccctgctagtaccttcagttgacacttctgactccaaagccataaggacatcaatttgtgtgggtttaagtgacagatttgtggccacctgtagcaacagctacgagaaactcctacaggcaggaacggggggcagaggcaacggtaattttcctattaaatataacttaagctaaaatgaaaatatcagcaatagaactgatgagactgtgggacagctggagcagtcacacaggtgctgggagtgcgtgctggtacaagggctttggaaaaccctgtggaagtgtgtgtgaccctgaacatacggtatctgggagccagcagttcccctcctgggcatatactaaagagaaaaagagaaacacgtgtaggcgctcaccaaagacacctactagaatagtcacagcagcccaatctttttttttttttttggagacggagtcttgctctgtcgcctaggctggagtgcagtggcacaatctcggctcactgcaagctccgcctcccgggttcacgccgttctcctgcctcagcctcccgagtagctgggactacaggcgcccgctaccatgcccagctaattttttttttttttggtatttttagtaaagacggggtttcaccgtgttagccaggatggtctcgatctcctgacttcgtgatccgcccgcctcggcctcccaaagtgctgggattagaggcgtgagccactgcgcccggccacagcagcccaatcttaatagcttcaaacaggaagttacccaaatgcccatcagcaggaatggtggtgtcccaccccttccattgagagtggggtctgtgtgccagtcccctgagtatgggtgggcttgtgacttctaacactaataagtgtggggaaaatgaactgatgtgacatctaaggctgaatcataagaagtgtgagctttggccgggcgcggtggctcatgcctgtaatcccagcactttgggaggccgaggcaggcggatcgcctgaggtcaagaggtcaagactagcctggccaacaaggtgaaaccccgtctctactaaaaatacaaaaattagctgggcttggtggcaggcgcctgcaatcccagcaacttgggaggctggagcaggagaatcgcttgaacctggtaggcggaggctgcagtgagctgagatcgtgccactgcactccagcctgggtgatagagcaatatttcatctcaaaaaaaaaaaaaaaaaagaaaagtgtgatgctgtgtaagaaacccaactgcttcaggatcaccatgttggagaggtcatgtgtagggctcaggtgactgtcccagctgagccgagccttctggctgtccccaccatagtttcagacctgtgagtgaagaatcatcttatacatagaggcctcatccccagctgttccaaccctgagcttttcagtcaccctgagccattcgcctcacccctgcggaggctttagcatcatggagcagagacaaaactccttgggtttgacttttcagaatttttgatccacagaatcatggaattgtcacaccatttagttgggagtggggttgttacatagcagcaaataaccaaacacaaataataaataagttatgggatagtcatgcaatggaatgtttacacagtatctacttgtagatgatatgtcttctccctcaaacagaaagtaagggttcaagagctaagctatgaagatgcaaaggcataagaatgatacaatggacttcagggactccgggggaaagggtgggaagggggtgagggataaaagaccacaaattgggttcagtgtatacttctcagttgatgggtgaaccaaaatctcacaaatcacaactaaagaaattactcatgtaacaaaataccacctgttccccaaaaacttatgaaaataaaattaaaaaaaaaatcatacataggcggggcgcagtggctcaacgcctataatcccagaatcttgggaggccgaggcgggcagattatttgagatcaggagtttgagaccagcctggccaatatggtgaaaccccgtctctattaaaaatacaaaaattagctgggtgtggtggctcactcctgtggtcccagctacttgggaggctgaggcaggagaattgcttgaacccaggaggcagactttgcagtgagtcgagatcacgccattgcactccagccagggcgaagaagtgagactccatctcaaaaaaaaaaaaaaaaaaaaaaattgtgtgtcattggcattaactttttttagtaaagaaaaaaatggaaaaacaaaaaaaaatggagatatgagaggataatcaccctcatatatttaaatctgttatatatatgaaatttgtgcccgggcatgatattggttttgattatttttatttgcttgagaagtatacctaggtttttctttttttctttttcctttttctttttttgttttgagatggagtcccgctcccatcacacaggctggagtgcagtggcgaaatctcggctcattgcaattttcacctcccgggttcaagcgattctccttcctcagtctcccaagtagctgggattacaggcatgagccaccatgccctgcccttcctgctcctcttgagtatgtctagtaattgacacacttggctgtccacacttcttggccttacagacactgtgctctataacatgactcttaggtctctgcagggcagcccccacttgttgcaggctgacgctgctgcctcctcctcaggcccaccttgcttcccatggcatagtgctggccttagccactcccagatactttcatcacactggtgctatgaagccctgccctgtaactgtcccctgctttgagctttgacctatgaaaaatgaccatcacttgcatctcagtgatgctagtgtccctctcactaccgcagtgctcaccagccctcctcaccatcctagtcagctactgggttattttcttctgtaaaaggcacgttctggcctggcgcggtgctgcagaccatcagcacctctgtgatgaggtgctcactgccatcttgtggtgggggggggtcatctaaacccagaagtgattgtcacggttggctttctagaatctttgctggaatcacatgttggggatcatgttctctaaaagcaaagcatgaggaggtgattcaagaggtgcattgggccaggcacagtggctcacacctgtaatcccagcactttggaaggctgaggcaggaggatcaactgaggtcaggagttcgaaaccagcctgaccaacatggagaaacccgtttctactaaaaatacaaaattagctgggcgtggtggtgcatgcctgtaatcccaggtacttgggaggctgaggaaggagaatcacttgaacccgcgaggcagaggttgtggtgagctgagattgcgccattgcattccagcctgggcaacaagagtgaaactccgtctcaaaaaaaaaaaaaaaaaaaaaaaagatgcattgcaggagtgcgctggggagctcgaggaaagcagcgaagaccagatctggctggagaccctcttaagtctgatcccagggaggctctggagcatgcaccgcagcacagaaggggcctcaccttggtcgctcttatatctctgtgctagcgtgtccctggctgttggctgttctcaggaaggaggtgaatagcaaccacctggaccaggtgactgcccttcagctgaggtcaaatctctgcaggaaaatcatctatgaggtaggaatgagcatcctggagaaggggacctgagcagtgcacccacagtaattcctacactgtgtaaatgtctttaaagaaaagtccagggctgggcatggtggcttatgcttgtaatcccagaactttgggaggccaaggtggggggattgcttgagcctaggagtttgaggctgcagtgtgccatgattgcaccactgcactccaacctgggtgacagagtgagaccctgtctctaaacaaaacaaaaaacaaaacaaaacaacacccccaaacccccagaacatcctgttttgagcaggcctatgcaaatttactcccaaaggccaaagaagctgagagtctgaagaagaggctgacaaatcaaatttctgaagtacaaacatttaatattgcttaaagaagagcaggcatgtttgggtggcagggagatgagatggtggaatcccacactgttacctcccagacccaaggcttacatgcaataggatagaatggtataaaagcccttttatactgtgggttatacaaggaattgaagttgattgcttagaagaagagaaggatttgactaagggcagggtttaggtgaaagtagtaactgtaggcacatttctggagctggctttcatcagaagtcaatttggcaggtgagcatccaagatgaagtgtccttattctccacactccatccccctaattcggctcttacaatctcacgcgccttcctcttccaagatggtccctgagcctttaggcagggaggttggggtgaacatgctgcatcaatgtgttttctacttttttaagcagaggccacagcaacactacagcaggctttgtagaaatcatcagcagcctttgtagaaacagcaggctttgtagaatcatcttcagaatactgtgattttggttaattcagaagtactacaatgaaagatctataacattaataatttgaatagtaggaatagaatgcacacaggattacaataaaaattgttgttgcattagaagccaactaaaactatcataaagaaaaagaaaacccatttattccttggatacttgtagtcaggaaataattcagaatttagaccaaattgcaggtaaataataaaaacctcaaaaacaatgtttagggctagaatctaataacaggtgtagtatagttttcttctgaaacctaattttttttatcttcagtttccacatttctatgaaggataaattgtagtaggaccaatttatttgcaaaataaattttaatttcattatacttggtctgattattattattattatttgagacaaagtctcactctattgcccaggctggagtgcagtggtgtgatctcagctcactgcaatctctgcctcccaggttcaagtgattctcctccctcagtctcccaagtagctgggattacaggtgcatgccaccatgcctggctaattttgtatttttagtagagacagggttttatcatgttgcctaggctggtcttgaactcctgatttcaggtgatcctgcctcagcctcccaaagtgctgggattgcaggcatgagccaccgtgcccagccgtggcctgattatttgcaataatgtgtagaaagaatagtgattggccatatagcctcttttaaaattggctttgctggacctttcacaagtaattttggactagatgtttagaaacatcaagggcaggaagcaaaaccaataatttgccatcagactgtgcttgtagtacctgtataaccatgcaacatgttcttcttgcccattgcacagacaaaaccaatttactgagtccgtggtattgcagtagagaaggtttaattaaatcagagcaacccaaggggtaggactgggattattaatcaatctccctaataactcagaggctaggatttttatggataatttggaaggcagggggctagggaatggttgctgctgattgtttgaggatgaaatcataggggtgtggaaaatggtcctcatgcactaagtccatctctgggtgggggtcacaggactggaaatctcaggacctctggccatgtgactcctgagaagcaagagattatagaaaggcaagctgtgggacaatgacttgttatcagtcagctacacctgcattttagcagaattcaggcccctctcataatcttaatcttgtgggctttcatttgtcatacaaaggtagtttcagtccctgagcaaggaaggggttcattttagggagagactattatcatccgtgcttcaaagttaaactataaactaaattcctcccatggctagcttggcctatgcccaagagtgagcaagggcagccagcctgaggccagacacgagatgaagtcagccatgctggacttctctcatattcataatctttgcaacagcaatttcacctgtatgaactgggtgaattcccccatcttcttgagatccctacataacttgaggttcctgagcctgtcagaaagtgacattctttactttccacaggtgagggaccttaaaaggaaagcatattgaaaatatacccagtctttttttctccaagaagattcttatcagctccataaagtcaacttcaattcctcaaataagtcgtatttgaattcattccactgtaagccttcaaagagtaatgagtatctccaatggttcctgttacgaaagaaaaccgaatctgattgagcttgtgccaataattatattgccataagtaaaaatactcacaaatagtttccaaattttggagaattcttacagggagaaaggtcagtttcactcacaaaagtatacttggtcaattgctgttagttataaatagctcaaaagaaaggttttcctgatgcttcttctaacagagtggcagtcttccaaacaggatgttgtctgttcactttggaattgctatccagagagcaagcagctctttgtcggccaggcgagagctgtttattaggcactgtagaatctagcagcatctcgagatggagcagggacccctcttaggggcttactcgatcaccatcagccagtatggagataaaggaaaatcttgacttccttcaagggaaattccaggcatctagctaggcttgagaagtaaatgagcaacttgatcaacgagaaggtaatggtaacttaaaacaatagccaaggaaattggagtcgtaacatatttggttccctgtgaaaactaaagataacatcttaacatatgtctctgagttgtttccggaaacctggaccctcaccagaaaatactaaaaatacaaaaattagccaggtgtggtgatgagtgcctgtagtcccagctactcgggaggctgagacaggagaattgcttgaacccaggaggtggaggttgcagtgaggcgagatcatgccattacactccagcctgggcgacaagagtgagacgtctgctaaaaaaaaaaaaaaaaaaaaagaaaaccaaagacattgcttactctcatcatccattagttactctcatcatccagttactctcatcattcattttagtaaaggctcctccagaagctgatagcagtctcactcagattgtaccctctggtttctgtactttgttttgctcctccccaacagttactaggttcttggtaaccacaattctcagaagtactttctattgtccctacatgatttggtctttgggaggtggctctgagctagtggctgagactcacattcactgaaatctaagcttagtgtagcatcaagattgaagccagcactctgttttaattttactttagctatgacaggtaacaataactatgggattgaatattacccttttttcttattttgtttgcattttcttaggcatccagtaaactgactcctccaagagttggattcatttctaaattccccagcaaactttaccttcagtaactgtggctctgtgccatgggtaactacatggccactcaggaatcagaggttcctcattactcacctttttatttttttgctttctatacattcaattgtatctatatcattgtgaaagaaaacagaatctccaggcccccaactcactatggctaagggcaagtgaagtttggaaacgtagtcacacaatcctgctttcttttttccccaaacacatagctgtaatttcacaaccctgcgtcattgccgtatcattggggtaaacgagaatatcccagtgacacaaggacacatatcttcccagatggctttcctcataagttgctcacgcggaaattccttgtgagcccctaactctttcaggagaaatattgtaaacaaaaagtaaaattctaatccccccaaccaaccgaatagagccccttcttgtccaagggtatcccctgcaaacctgaaaaactaattcaggtcacgatgagaaggcagggggtcagacacacctcattatatttcttccctttggagttcatgcaaagtgaccagcactaacattaaaacagagatcctggctgggcacaatagctcacatttgcagtcccagcactttgggaggtcgaggtgggcagatgacacgaggccaggagttcaagaccagcctggccaacagggcaaaataccatctctactgaaaatacaaaaattagctgggtgtggtggcgcacacctgtaatcctagttacttaaggggctgaggcacgagaatcacctgaacacaggaggcagaggtttcagtgaatgaagatcgcaccactgcactccagactgggtgacagagtgagaccctgtctcaagaaataagaggaaaaaatagagatcccaacagtgacggaacagactctttgttgcaataagataaccgactccaacctgactctggtatagcatcacataatagataacattccctaaaggaaatcaaagtattttatccccaaatgtatttctttgacatattttggaatggccctgcaaagccatctcttattggagaaatctatagagcatcctcttcctggcttggcacggtgggtcacgcctataatcccagcactttgggaggctgaggtgggcagatcacaaggtcaggagtttgagaccagcctggccaatatggcaaaaccccatctctactaaaaatacaagaaaaaaaaattagctgggtgtggtggtgtgcacctgtagtcccagctactcgggaggctgaggcagaagaattgcttgaacctgggaggtggaggttcaagcaattgtatatttaggatattacaagtatcctggattaagtaatatcctggatattaggaaccatattataaggagggtggacacctttttcgatatggggagtaatattatgctctccccccagaatattatgaacaatttcacaaggggggtgtacacatcctgtgacaatgggagtaatatcatcctctttaaaaaaatattagtatcgatatcatggaggggtgtacacgctctgcaatattgggagtaatattattctctttttccccggatattcacaagaatgtcacagaggtggtgtacaattcctgtgatattgggagtaatatattctctccccctagatattagaaacaatatcaaatggtgagtgtacacactctgtgaaattgggagtaatgtcatcctcttccccctggatagtaaaaacaatattactgggggttgtgtagactttctgcgatattgggagtaatatcatcctatcccgccctggatattaggatcaatattacagagggtgtacaccctctgcgatatagggagtaatatcatcctttccccccgaatattaaaatcaatatcacagaggagtatacacctcctgtgatattgggaataatatcatcctctcccttccctgtacgttagaaacaatatcacaaggggtgtgaacacctcctgtgatattgggagtaacatcaccctattatctttggatattaggagcaatatcaccttgggggtgggcaccttctgtgatattggtagtaatattattctctccctccctggatattaggaccaatatcacagaaggggtttacaccttttctgatattgggagcaatattatcctcttctcttctggatattaaaaacaatatcaaaaggtcggtgtacagcccctgtgatattgggagtaatatcatcctttttccccataaatattaaaattaatataattttcttccccctggctattaggcacaatatcacaagggtgtgtacacccccttcggtattaagcgtaatatcatcctctcaccccctggttattagaaacaatgtcacgggggagtgtacatcccctgcgatattgggagtaatatcatccctacctccctggatattagaaacaatatcacaggggagttgtaagcttcctgcgatattgggagtaatattatcctctccccttctggatattaggaacaatatcacagggaaagtgtacaccttctgtgatatagggagtaatatcattttctcccccactggatgttagaaacaatatcacagggaaggtgtacagcccctgccatattaggaataatatcatcctctcccctcatggatattaggagcaatatcacaggggaatgtacaccccttgcgatattgaaagtaatgtcatcctcccctactctggatattaggaacaatatcacaggggttgtgtacacgccctgcaatattgggagtaatattctctcccccactggatattaaaaacaatatcacagggggttgtacaccccctgcaattttggaagaaatattatcttttctccccgtgtatatcagaaacaatatcacaagggggtgtacacactctgcgatatcgggagttacactgtcctctttccccatacatattagggacaatatcaatacgtgggtgtacatcccctgtggtattgttcttaatatcatcctctgcccccctatataataaaaacaatatcacaggaaaggtgtacatttcctttgatattgagagtgatatcatcctctttccccttagatattataaacaatatcacaggaggggtgaacaccccctgtgatatagggagtaatatcatcctctaccgccctgaatataaagagtaatataacagagggggtgtacacactctgtgatattgacagtaatataattctctgccccccagatattaggaacaatatcaaaaaaggggtgtacaacccctgtgatattgggagtaacatcctctccttccctggatattacaaacaatatcacaggggaatgtacaccctcccctgtgtatggggtagtaatataattatctcccccactagatattagaaacaatatcacagggaaacaatatcactgcgatattgggagtaatactatttctcccagcccgagtattagaaacagtatcacagggggagtgtacactccctgcaatattgagagtaaaaccatcctctccccacttggatattagaaacaatatcacagggaaggtatacgtccccttagatattgggggtaatagcattctcttttttcctgggtattaggagcaatatcacaggggtggtgtacaccctgcaatactgggggtaatatcattctcttcccttttggatattaggaacaatatcacagggaaagtgtgcaccttcggcgacattaggagtaatatcatactcttccctccttgatattagcaacaacgccacaggtttacatcccctgtgatattgggagtcatatcatcctcttttccccttgatattagaagcaatatcacaaagggtgtattcattccctgctatactgggaagaatatcaacctctttttttcccctggatattaggaataatatcccagggggagtgtacccattctgctatattgagagaaatatcaccctcatttcccctggatattagaaacaatataaaaggggggggtgtacacttcctgtgatattgggattgatatcatcctcttcctttttggatattaggaacaatatcacaggggggtgaacactctttgtgatatggaaagtaatattatcctctccccccctggatattaggaacaatatcaaagagggcatatacatcccctgcgatattgggagtaatattatcctctccccccctaaatcctaaatattaggagcaatattacagggtggagtttacaacccttgcaatattgggagtaatatcaccctctcctcccctggatattaggaacaatatcacagggatgtgcacaccccctgcaatatggagagtaatatcattctctcccttcctggatattaggaaccatatcacaggtggggttcacaacccctgtgatattgggagtaatatcatcttctttttttctggatattaggaacaatgtctattgggggaactagcccccaatatttcaaagtaggttcttttctattttccttaagtgtcacctggtctgagaaataaagtgaaagagtacgaaagagaaattttacagctgagcctccggggtgacatcacatatcggcaggttctgtgatgaccacctgatctgcaaaaccagcaagtttttattagggacttcaaaaggggagggggatacgaatagggagtgggtcacagagatcacatgcttcaaatggcaataaaagatcacaagggcagaagggcctagcaaggtcacaaggccagggagaaaatggaattactattgaggttccatgtcctgctgtgcacgcattgtcattgataaacatcttaacaggaaacggggttcaagagcagagaactggtctgactagaattcgccaggctggaatttctaatcctagcaagcctgagggcactgcaggggaccagggtgtatttcatcccttatcttcaaccacataagggatacacccccagagcggccgtccataggcctcccctaggaatgcgttcccttcccagtgatatttctcctactcattttctgcaataagaaaaatgtgactctgttctgcccagccccacaggcagtcagaccttatgcttatctcccttgttcgctgaacatcgctcttatcctgttctttttcagggtgcccagatttcatattgttcaaatacacatgttttataaacaatttgtggagttaatgcaatcatcacagggtcctgaggcgacatacatcctcagctcacaaagatgatgagattaagagattaaagtaaagacaggcataggaaattataaaagtattgattggggaagtgataaatgtccatgaaatcttcacaatttatgttcagagattgcagtaaaggcaggcataagaaattataaaagtattaatttggggataatatccctgtaatatccctggatattacaaactttaccacaaaggggtgtacaccccctgagatatggggataattacaccttccctccccccttgattttacgatccatactacaagggggtgtacactccctgcaatatggggagtaatagcaccttttcccctgctggatattacgaaccacaggggggtgtacaccccccttgatatggggagtcatagtgtagcaggaggagtcgcggacaaaaccccacagacaccgaggtagtgaaggaagtggcttttaatcagctggaagcatcgaaagactagcgtctcaaaatccgagcttgttgagtgcacaatttctgtcctttttaagggctcacaacactaaagatcttacatgaaagggccatgattgattgagcaatctagtgggtatgtgacaggggctgcaggcaccggtaatcagagtgaaacagcacagaacaagaaatttcacaatgtccttccatacaatgtctggaatctatggataacattggttgctaggtcatgggttgaattttaactatcaggctaaggtcaggcaggcccaggcctggtttcgggtctggttttgggtctggtgcctggcgccgggctgcctgcttttggtttcacttccttgtttcttcttaaaacaggtactgagtataaaataatatagaacaatatggggggtctctttctctcttcttttgatagcatcccctcaccccggatattacgaaccataccataggggggtgtacgcctcctgcaaaatggggaataatagcaccctctcttaccctggatatttcgaaccataccacagggaggtgcactccccccacgatatggggagtatgggggtaacagtaccctcaatcccctggatattacgaaccataccacaggggagtgtacatttccagcgatatgaggggtaacaacaccctctccgttcctggagaatacaaaacataccacacaggggtgtacacaccccgcgatatagggagtcatagcatcctctctccccctggatattaggaaccgtaccgcagcagggtgtacatgccccgcactgtggggagtaatagcaccctctccctgcctggatattatgaaccataccacagtggggtgtacaccccttgcaatatggaaagtaatagcaccctctttccttctggatattaagaaccataccaaaggggggtgtgcactccctgcgatattgaaagtaatattatcctgttcccttctgggtattaggaacaatatcacaagggaatgcacatgccctgcggtattttgagtaatatcatcctctccccttctgaatgtcaggatcaatatcacagggaggtgtacaccttctgcgatattggaagtaatatcatcctctccttttctggatattaggaacaatatcacagaaggtatgaacacccctgctatatatccagtaatatcagcctctcccctcctggatattaaggagaatatcacgggggggggggtgtaatatcatcctcttccctgctggatattaggaacaacatgacagggtgggtgtacacttcctggataatgggattaatatcatcctctttcttcctggatattaggaacactaccataggggaagtgtaacccccctgcaatattggtagtaatatcatcctctttttccctgattattatgaagaatatcacagcggggatgtacaatttctgctatattgagagtaatatcatcttctccccgcctgaatattagaaacaatatcacaggaaaaatacacaccctctgcgacattgggtgtaatatcatactcttttcccatggatattagaaataatatcataggtggggtgtataccccctgcgatattgggagtaatatcatcctcaccacttctggatattaggaacaatatcacaggaggtgtgtacaccccttgctacaatgggagtaatatcatgctctttccccctggatactaaaaactatatcacaagaaaggagtacaaaccctgtgatattgaaagtaatattatcttctttcccccttaatattaggaacaatatcacatggggtgtgtacacctcctgcgatattgagagtaatattattttcccctcgcctggatataaggaacaatatcacaggaggggtgtacaccccctgtgataatgaaagtaatataatctcctccccctcttgatattaaaaacaatatcacctgaggagcacacaccccctgtgatatggagactaatatcattttctccccaccgaaatatttagaacaatatcacggggggtgtacaccttatgtgatattgggagtaatatcatcctctcccaccctgtatatcaaaaacaatatcacagggagtgtgtacactccctgtaatattcacaataatatcatcgttttcttccctggatattaggaacaatatcacaagggtggtgtacatcccctgtgatattgggagtaatatcatcatctcctcccatggatattaggaaccatatcacaggaggggtgtacaccttgtgcgatattgggagtaatattatgttctctccacctggatattaggaacaatatcacatgagcggtgtacaccccctgcgatattgggagtaatgccattttctcccccttgatattaaaagcaatatcaccaggcggagtgcacaccccctgcgatatcgagactaatatcattttctgccaacctaactattaagtacaatatcacagggggtgttcaccccttgccatattgataataatctcccctcctggatatgaaaaacaatatcacaggggcgtcgtgcaccccctgcgatactgggagtaatataatcctctccacaccctggatatgaggaacaatattacaaagcgggtgtacaccccctggaatattcacagtaatatcatcgtttcctttcctggatattaggaacaatatcacaaggggggtgtagacctccagcgattttgggagtaatattttcctctccccctctgtatattagaaaccatcatgggggggtgtacaccacctgcgatattgggagtaatatcatcctcttcacccctggttattaggaacagtatcacttgaggggtgtacctctactgcgatatcaggcataataacatcctctccccccgaatattaagaacaatatcacaggtggactgcacaccctctgtgatattgaaaataatatcatcctctgcttccctgaatattaggaataatatcacaaggggggtggacaaccccttctatatgaggagtaatatcctcttccttcctttatattaggatcaatatcacaaggggggtgtacaccccctgcaatattgggagtaatattaccctctctttttctggatatcagaacaatatcacaggggaagtatacattccctgtgatattgcgagtaatattctttccctctactaaatatttgcaacaatatcacagaaaaggtgtacaacccctacgatattggcagtaatactattctcttccccctggatattaggaacaatattacaggttaaatgtacactcctaagatattgggagtaatatcattctcttttgctctggatattaggaacaatatcgcaagggcgatgtacactctctgagatattgaaagtaatttaattatctccctcccggctattaggaacaatatcaccggggagtgtacaccctctgcaatatttagagaaataagatccccttttcccctagattttaagaactatattacaggggatgtgtgtacaccccctgcgatgttgggagtaatatcatcctctctccccctaaatatttggaacaatattacaggggtggtgtacacaccctgcgatactggcaataatgtcatcctctccttttctgcatattgggaacaacataatgggggagtgtacacctcctgcgatattaggagtaatatcatcttcttctgccctggttactaggagcaatatcacagaaggttgtataacccctgcgatattgggagtaatatcatccttccccccacgtatatcccagccttgatattaggaacaatattacaggggaggtgtataccccctgctataaggggagtaacataatcccctttcttcctggatactagcagcaatatcacaggggttgtgtacaacccctccgatattgaaagtaacttcatcttctttccctctgaatattaggaacaatatgatgcggaaggtgtacaccccctgtggtattgagagtgatatcattttctcctagcttggatattagaaacaatatcacaggaggggtgtacacccactgcgatatcgggagtaatataatcctctcccacccctggatattaggaacaatattaggatattaggaaggtgtacactccttggaatatttatagtaatatcatcgtttccttccctggatattaggaaaaatatcagaagggggtgtacacaccccagagattttgggagtaatatcaccctctcccccggatattaagaacaatgttattggaagtgtgtatgccttctgcgatatttggactcatatcattttctcccaacctaaatattaagaacaataccacagagggtgtacagctcctgcaatattgaaagtaatatcatcctctccttccctagatattaggaacaatatcacagggcgtgtacacctcctgcgatattgggagtaatgtcatcctttcccatccttgatattagaaaaatatcacaggggggtatacactccctacacaaattgaaagtaatatcctctccaccgctggatattaggagcaatataacgggggagggcctgtatacaccctgcaatattgggagcaatattattttctcctccactggattttaggaataatatcacagtgtgggtgtaaaccccctgcgatattgggagtaacatcatcctctttccccatggatattaaatacaatatcacaggaggggtctacactgtctttgatattgggagtaatattattctttctcttccttgatataaggaacaatatcagagggggatatacaccacctgcaatattgggagtaatatcatcctttccctttctgaatattaggaacaatatcacaaaaaaggtgtacactgcctgcaatactgagagtaatataatcctctcccttcctggatattagaaacaatatcccaaaagggatgtacactcccagcgatattgaaagtcatataatcgtttccttccctggatattatgaagaatatcacagggtgggtgtccactttctgcgatattaagagtaatatcatcctctctcctcctgaatattacgaacaatatcgcatggaggatgtacatcccttgcgatattgggagtaatatcctcctctctcccccttgatattaggaacaatatcacgggggagcggtgcacacaccctgcgatattgggactaatgtcatttccccccacccggatcataggaacaatataacagggaaagtgcacaccccctgcgatattgagggtaatatcatcctctcccgccctggatattaggaacaatatcacagggcgttgtacacctcctgcgatattaggaacaatatcatgctgtccccttctgtatattaggaacagtatcacagggggttgtacaccccctgcgatattgggagaaatattatccccttctcccctgtatattaggaaccatatcacaggctgtgtgtacaccccttgtcatattctgagttagatcatcctctccccctctggatattaggaacaatatcataggcgtgggtacaccccctgcaatattaagagtaatatcatcctctccctccctgaatgttaggaacaatatcacagggggaaagaaccccctgcgatatttggagtaatatcatactctccccacctgtatattcagaacaataacacaggggatttatacatcccatgcaatattgaaagtaatatcatcctctctccatctggatattaaaaaagaatatcagaggggggagtacacaatacatcccctttgtattgggagtaattttatcttctctctttttaaatattaaaaacaatatcaccggaaaggtttactccctctgtgatattgaaagcaaaatcatcctctaccccctggatgtaagaaataatattatggggagggtgtacatcttctaagatattgggagtcatattactttctcccctcctggatattagaaacaatatcacggggagggggtacagacccagcaattttgaaaatagtattatcctaactcttcttccgctggatattaggaacaatatcgcaggggttgtgtaaactccctgtgatattgaaagtaatatcatcctctccctccctggatattaggaccaatatctcaggaaggttgtacaccctttgcgatattgggagcaatattatcctcttccaccccggatattaggaacaacatcacagggtggggtacaccccctgcgatattaacaataatatcatcctctcctcccctggatattagaaacaatatcacagggatgcgtacaccccctgtgatattgaaaataatatcatcatcttttcctctggatgttaggaacaatatcacacagggggtttacaccgcctgtgatattgggagtaatatcattctctcaatccctggatattaggaacaacttcacagggggagtgtacaccccctgcgatatcgggagtattatacccttctccccctgtgaatattagaaacaatatcacagggaatctgtacatcccctgtgatattgacaataatatcatcctctctcccccagatattaggaacaatatcatagaacgggtgtacacccgctggaatattgggagtaatatcattttctccacccccggatattagaaacaatatcacagaaccagtgtatacgccctgcaatattgacagtaatatcatcctctcttttcctggatattaggaacaatatcacaaaggggtgtacatgccctgtgctgctggaaatagtatcatcctgtgtcttcctggatattaggaacaatattaaagggggaatgtacaccccctgtgatattgggattaatatttttctttcccctcctggatattagaaacaatatcacagagagggtgtacccccctgcagtattaggagttatatcatcctgtttcgttctggatattaaagacaatatctcaaagggtgtgtacacccctttcagttttggaaggaatgtcaccctcttctctcctggatattaggaacaatgtcacaaagaggaagtacacaccctgcgacattgggagtaatatcatcctttttcccccttgatattagaaacaatatcccagcggggtgtacagcccctgtgatattgggagtaatatcatcctctctcctgctgcatattggcaacaatattacagagtgtatgtacaccccctgtgatattgggagtaatattctttctccccatgaattttaggaacaacatcacaaggcgggtgtacatgccctgggatattgggagtactattatcctctcacaccctggatattaggaagaatattacagcggggtgtacaccccctgtgatacttggagacatatcctctccccttctggatattttgaacaatatgataggtggtgtacagcccctgccatatggggaggaatgtcattttctcctttcccggatattacaaacaatatcacagtggggtgtacacccactatgatattgcaagtaatatcatcctctcccattctgaacattccacttccccctggatattacgaataatatcccggggcgggggtgtacaccccctgcgatattaagagtaatatcagcctctttcttctggatgttacaaacaatatcacagggaggtgtacactctctgagatattaagagtaataacatccttttttcctctggatatttgggacaatgtcacaggaggtgtacacactttgcgatattgggacagatatcatcccctccccctcttaatattatgaacagtattcaaaaatgtacaccccctgcaatattgggagtaacgttatcatctttaattctggatattacgatcaatatcagaagggggtgtacacctactttgatattgggagtaatatcatcctctcccccccgaatattgtgaacaagatcacagtgtggtgtatgtcccctgcaatactgggagtaatatctttctttccactcatgaatattagaaacaatattacagagggagtgtacaccccctgcgattttggaagtaatatcatcttctccacttccgaatattaggaacaatatcaaagggggggcctacactccctgagatgttgggagtaatagtatcctctcccctccctggatattacaaacaatatcacaggggagtgtacacctcctgtgatattgggagaaaattttctctcattccggatattataaacaataacacagtaatgtgtacaccgcctgcgatattgaaagtaatattatcctttttccctctgaatattgtgaacaatatcacagggaattgtacaccccctgcgatattgacagttatgtcatcctctttcccctaggatattatgaaccatatcacagggtggtgtatatcttctgcgagattcagaataatatcatcctcccttcttctggatattatgaacaatatcacagggagtgtacagtttttgtgatattgttagtaatatcatcctctccccttcttaatatcatgacaatatcacagaaaggtgtacaccacctgcaatattgggagtaatatcatcctctctacctctggatattacgaacaatatcacgggggggtgtacacttcctctcctcccctggatattatgaacaatatcatagagtgttgtacacaccctgcgatattgggagtaatataatcgtctcttcccctgaatattacaaacaataaaacaagggggtgtacaccccctgtgatattaggagtaatatcatcatttccccatctggatattacaaacaatgtcagagtaaggtgtacaccttctgcgatattggcaataatatcatatctccccttctggaaattaggaacaatatcataggggggtgtacacccactgtgatatttggagtaatatcactctctccttccctaaatattacgaacaatgacacaggagggttttcaccccttctgatattgagagtaatattatcctctctcccctggatattacaaaaaatatcacaaaggggtgtacaccctttgtgatatagggagtaatatcctctttttccctggatatcatgaacagtatcacataggggtgtaaaccttctgcgatattgagagtaatatcctctccttgcctggatattacaaacaatatcacaggagttctacaccccctgccatattgggagtaatatcgtcttctccttccctggatattatgaacaatatcacagagtggtgtaaaccttctgcgatattgggagtaatatcatcctctctttccctggacattacgaacaatatcacagaggggtgaacaccctccccaatagggcgagctatatcaccatctacacccctggatattacgaaccatatcaaagaagggagtacaccctccgtgatatggggagcaatatcaccctctccccttttgcatattatgaaccatatcacagggggctgtacacccttcgctttatgaagaacaatatcaccctcttcccgtctgggtattatgaaccatatcacaggggagggtgatccttccgcgatataaggagcaatatcaccctttcttcccctggatattacgaaccatatcacggggggtgtacaccccccctgatatgaggataaatgtaaatttctccccccatgaatattatgaaccaatccaggggggtgtacccccactgcgatatggggagcaatatcaccctctaaccccctggatattacaaaccatatcacagaggggtgtacacttctgggtattacgaaccatatcacaggggttgtacacccctcgggttatgaagagcaatattttcctctttcctcctggatattacgaaccatatcacaggaggatgtacgtcccccgcgatatggggagaaatatcaccctttcctttcctggatattaccaatcatatcacggagggtttacaccccctgcgatatggggagcaatatcactctctcctcccctggatattgcgaatcatataacaataaggtgtacaccttcctcgatgtaaggagcagtatcaccctctccactcctggatattacgaaccatattacatgggggtgtacactctccacaatatgggcagcaatattacctttttcttccctggatataacgaaccatatcacagaagggtgtacatcccctacaatatggggagaaatatcaccctctcccccacccggatattacagactataacacaggggggtgtacacacagaatatttacaatatcacagaaggggtgtacaccctttgtgatattaggagaaatatcattgcctccccttctggatattaggaatgatatcacggtgggggtgttcatgccctgaaatactaggagtaatacctttctctccccacccctgaatattaggaacaatatcaaatgggggtttacaccttctgtgattttgagactaataacctctcccccactggatattaggaaagacatcacgagggaggtgtacaccttctgcaatatagaaagtaatatcatcctctcctcctctgaatattaagaaccatatcacaggaggagtgcacactctctgcgatattgggagcaatatcatcctctttcttcctgaatattaggaagaatatcacagggaaagttatgcctgtaatcccaggactttgggaggccaaggtgggtggattatttgaggtcaggaattcaagaccagcctgaccaacatggtgaaaccccaactctactaaaaatacaaaaattagcctggtatggtgacagctgcctataatcccagctactccgaaggctgaggcaggagaatcgtgcgaacctgggaggcaaatgttgcagtgagccgagattgcgccattgcactccagtctgggcggcagagcaagactccatctcaaaaaaaaaaaaaaaaaaaaaaagaatcacgggggggtgtacacaccattcgatattgggagtaatatcatcccctttccccctaaatattaggaacaatatcacaggaagcgtgtacatcccctgcgatattgggagtaatatcacactttcttctcctaggtattactaacaatatcacagggggagtgtacatcccctgcgatattgaaagtaatatcatcctctttcttcatggatattaggaacaatatcataaaggtggtgtacaccccctgtgatattgggagtaatatcgtcctctccccccatcgatattaggaacaataacacagggttggtgtacaccccttgtgatatttggagaaatatcataatctccccaacctggatattaggaacaatatcacagaggggaggacaccccctggaatattcacagtaacatcatcgtttcctttcctggatattgggaataatattatcctctccaccctggatattaggaacaatatcacaagaggggtgtacaccctttgagattttgggggtaatatcatcctctcccaccctggatattaggaacaatatcacagggagggtgtacatccctctgagatattaagaataatatcgtcctttcccccatgggtattaggaacaatatcacgacaggtgtgtacacctattgtgatactgggaataatactatttcacccccccccgatgttgggaacaatatcacgggagggggctgtacagcccctgtgatattgggagtaatatcatcctttcatttcttggatattagaaacaatatcacggggggggcacactcccttcaatattaagggcaatatcactctctttcttcctgaatgttaggaaaaatattacaggggaatgtacacctcttgcaatatttggagtaatatctcctctccttttctggatattaggaactatatcaagggggggtgtacaccttctgcaatagtggtggtaatgtcatcttctttttccctggatattagcaacaatataacaaggaaggtgtacaccccctgcgatgttgaaagtaatattatcctctccttttctagatattatgaacaatattacagggaaggtgtacatcccctgcgacattgggagtaatatcatcctctcccatcctggatattaggaacaatatcacaggtggggtgtagacctcatgcaatattgggagtaatatcatcctctccctctggatattatgaggaatatcacagagggtttacctacagggtgtttaagatattgagagtaatatcatcccctccctaactggatcttttgaacaatatcacagaagggtgtacacttcctgtgacattgggagtaatattattcttcctcttatggatattacaaataatatcacaggttggtgtacagtctttgcgatattgggagtaatatcattctctcccccccggatattatgaacaatattacagtggggtgtacaccccctgtgatgctaaaagtgatatcatcctatcccctcctgggtgttaggaacattgtcacagagggggcacaacccctgagatattaggagtaatataattctctcccacacggatattacaaaaaatatcacagaggctgtacacacagggtgtttagaatattgagaataatgtcatcttctccctccctggatattacaatgaagagataacatccattactgctgctacagtggaggtacaactgatggtgtttgcattagtttcctgccatctgccatcatccttctggattttgaagataccagactggtgaattccgtgaaagagatgagtggaccaacactcgtctcgcagaagttggcaaggaatacatcaatttcctgacccttgcccttaggccattactctaacaggggtcatggtgatgtttccaaccatgggttttatgccagcaagaccttcatggccaacagcttctgaaagataacaatactcacctttgttcagtgctcagttacctaagcaaatgattgtaggtcttttccaagggaagctggagaatcccaaagttgtatacttcccttggttttgcatgaacctgcctcatgagaacccagtctctttttgaattagaccttcttatgtgagaactgtctcaggttttaactggatgaaggatgatgactttatatgagggctgctgacatctgtttctgttcctcttgatgatttctatttcctgttactgaagggactcacttgtctgccatttatatctgttgtccctaatgaaacatactctaagaggtaagtgctagatattgcaaagcagtcctcccctgatgcactctggcactggtgccagctccttatgcccaccttgcattgatggcaaagtgctggcctctgccattcccacatcttctcaccactttgttgctatgaatggagcccatctctgtaacagtgtggcctgctttaatgtctgacccatgaagaatgtccagcacttgatcttagccatgctggtgtccctctcactggggcagtggtcatgggcagccttttttttttttttttttttttttgagacgatgttttggtattgttgcccatgctggagtgtagcagtgcgactggggctcaccgccacctccgcctcccaggttcaagcaattctcatgcctcagcctctggagtagctgtgattacaggcgtctggcacaacacccatctaattttttgtgtttttagtagaggcagggtttcaccatgttggcgaggctggtctcaaactcctgacctcaggggattcacccaccttggcttcccaaagtgctgggattacaggcatgagccaccctgcctggccatcatgggcagtcttaaggatgatagtcagctcctggttcttcttctatagtagacccagtccaagatgcccactgatcgagtttggatctgtgtccccacccacatctcatgtgtaattgtaatccccaatggtggaggtggtcctggttgggccggtgagaattgagtggatcatatgggtggatatttcatgaataatttagcaccatcctctaggtgctgtctggtgatagagttctaaaaagatctgattgttcaaaagtgtgcagcacctctcctaccactagctccagctctggccatggaggatgagcctgattcccttgtgctttttgccatgactctaagttttctgacgcctccccagaagttgagctgatggccagcatcatcctttttgtacagcctgtggaaccatgagccaattaaacctgagtttttataattaattacccagtctcaggtaattctttatagtaatgcatgaaaagactaatacatgtacttctgaaccatgttattctttaccccaaagctatacatccttgcaattctgtgctgatcctaaccacctgcagtgagcccacactcctcaggttctgggcaaatttttccaccagcctaacctcacatccaatgctagccccagttttgcgatctcaggccactcacactaatctaaaacttgctgcaaattcaaaaggtcccatcactctcaggatgactattcagatagcaacactcatggaactaaaaaaaatcactggggtggggatcacatcccggcatttatagagtgactacatcccagacatgtgaagaaaactgaggagggaaccccaagggcttgaaagaccttgccgagtgtggagccctgaagtgcacataccactcggttgtcccccaggggcctgggaaccttgccaagtgcggggtctctagagcagaatccacaccgctggggaggtggatttcaggccagaaaccttcagggacctggagtcccaacacatgctaaaaacaggggtaggggcacagatatgaaagattttggagtatttggagcccagaagagaaaactgaaggtggcagcgtggagcgctcagaagatggcggagaccatggagcccaaaaaatccagaaaaagaggcggggacaggggatggacctcagaagcattcagaacgcacagggccccctccaaggtcgctttcacactgccaaggcttcctctgcagctgcagagctgcacttttcctctgtcccaacaaaaatatgtcccttgaaggtctcatctcccatggactggatctggatctgggcctcatttatccaggggcctcagtcctcaaggaggccattgtcactctgcttcccgataaagtcctcttaagttagtaaatgcccctcaagggacccatggtttgtccttattcctccctgagtcttctccttctgagggaggaagttttcaaacacccccaggatttactgccagaatttcaccctctgaaacctcctccttccctagatccagtccagctcctcatcctcagccccccagaccccatggaggtgtcccatgcaatgggttttttctagattgacagcctcccctcctcagcgtacaactcagagactcaccctgttctgagcagcgagccaccgcataagcagacatgagacctcactccagccaaataacactttatttttgtagtttcaatgcttttcttccccgaggaaagggaggagctcaggagaacagtgtcatcaaaatttcctggtggttgtttaatcacagcagcagagtaggtcaggaaactcttccagattaccctcttcctcctgaaattaaaggaaacatgcacgactcatgaactgataaggtttcccaacaattgtgcgaatatcctgctggatttatgagctgaaagtaaacctgaatgacttgtgctgcttgtccaggcattatcttcttcaggaaatatgagatgttgtttggaagcatttcagaagcaagggaagctgctttgttgaatacatagatgagcatcttcttgattagaaacttcaacccagcgattaagggtctcgttactagttttgagacatatgtcattaattggtcggcaaaccatttttttatcacatccatcagaaaatcgaccactttctccactagcatttccatggccatgttcattataagtgaagtaaatgagctcacaaaaagtgtaatgagtgttctgtcggtttcacgtaaagatatataatggtatcgtccctggagagcgtggccattttatgggaggtgacgtggagggggcgggccaagatggccaattagaagaggctgccttccactgaattaaagtctcagtgaatttcacgataagcacgtgaactgaaatattcaggttctcacattgggactgactaggcaaacaacttgacccaggagaacaaagaaaacaggggtgggtgatgaaccacgctatattggaacagagccaaaggaaccttcttgcacagccaagagaagccatgagtgtgtgaccccgccccagaaaccatttttctcccttggatctttgcaaccaagaaatcaggagatcctcccatgggctgagtcacggcggccttgggcctagtacacagggctgtgtggagtgttggcagagcagctgctcagacacagaccgagacccaggaggtttacacaatctagccttgagaaaccaggaaaggtgggagttccgttggtacattcccccagtaagggggctgaattcaggtgttatacgagttgttaagaaattattttgggcagacagggaggaaaaggggtccttgggaagttttgtttcttcttaaagcagctccagaaatgagtcttgtctagcaggaaagccccggcttttagagttctccggtaaccttgatctgcagatgccggccattagaaactgggtccacccaaacatagcgattcccgccctcttctggcccttgtccccacctgtgcctggcgatatggccacccccatatatccccatgagtgtaggaaatcagggtgtccggcacgtgcatattcaaaggctaggtgggagggccagtttttccgtgggccacataaatgacatgcctggtcgaaccaatcgcctgaaccctatgcaaatcagacaccaccccctccagtttcttcatataactcattggtatccacagcactccgggtttcctcttttggctttggagcccccctccctctgtctcagtatggggagctcttccttcgttcttgcctattaaactgcacgccataaaaccactgtacatgtgtttgtgtcattttctccaattctgtgtgagacatgagccctggtgttcctccactcatcacagccatatcacagggagccagacagcctcatcctgtggtccccatcatcacagcacttctcaagtcccacgggcttggaataccagccaagcagtggcaagatagcaagccaagtgcctgagactaccgagttctgggtggttggggcggccaccgtctctgtttccgtagactcagacaatctagccttcgggctccagggagggcagctggtctggagcaggaggggtcccccacaaggcagcactgctgctgtgcctgatagtggccagactgtttctttaaatttgaccttgattcatccctcctcactgggaaggtcctccctgttggaatttcaggaactccagccagggttatagggttggtgggaagcctgatctctttctgggttggaggtcctccggggatgggcggctgccatctttgtaattgtggactcaaccttttcagctgaagcaaatgaacaaagctgggagcatcacatttcctaactctaaaatatattacacagccatagtcaccaatacagcatggtacaggtataaatgtggacacacagattgatgtaacagacgagagaatccaaaatgaaagccacacattcataggcaactgatctttgacaaagctgacaagaatatacactagggaaagcacacccttttcaataattggtactgggacagttgcattgtcatatgcggaagaataaatctgaactcctatttcttaccatgtttacaaaaatcaatttaaagtgaattatagactgaaatgtatgtactgaaatggtcaaaatatcagaagaaacttagggaaaactcttctggtcattgtccagtaaagagttcacgagtaagacttcaaaagtacaggcaacaaaaccaaaaagagaccaatgtaaatttaaaccaaactaaaaattttaattaaattaaaaagccatacaccatttttctatctcatccctaagaaaatggaccacgtcatccactagcatttccatggcaccttcattataggcgaagtaagtgagcccatgataagtgtaatgagccttctgtttatttcaggcgaagttaagtaatggatattcctggagtggtgtggattttacagaaagtgacgtgaagtgggcaggccaagatgcccaatgagaagcagctgtcttcccctgaatgaaaagcacggtgaattcagcaccttgaactgaagtatccaggttcctacattgggactgattaggcaaatgacttgacccaggagaagaaacaaagggggtgggtgatggtgcacccagtatcagcacagagccaaagaaaccttcacctacagccaagagaagcagtagtgaatgcacaacccctacccacaaaccatgtttctcccatgcatctttgccacgcatggatcagaagatcctcccattagctcatgccataagggtcttgggtcagatacacagagccgtgtcgaatgttgccagagcactcgctcagacactcacagagactcaggagttttatatacttggaaagctgggcaaggcgggagttccatctgtacattcccttagaaaaggggctgaatccagggagccaagcagcctcattccgtgggccccacttccacagcacctctcaagttaagacccactggcttggaatagcagccaaccagtggcaatcggctggagactgcctgagactacagttttctggggaggtgagggcggcctccatttctgtgtttccatggactcagacattctagcctgcaggctccagggaatccaggtggtctggtcccccacaaggcagcacagctgctgtgcctgattgtggccagacagattccttaagtaggaccttcattcatcccccctcactgggtagggcctccctttgggaatttcaggagttccagccatggttatatggtcagtgggagccatgatctttttccgggaaggagccctgcgaggaggggcagcttcatctctgcagctgttgactcagcctttctgaagcaaataaacaaagctgggagcatcacatttcttgacttcaaattatattacaaagccatcatcaccaatacagcatggtagtagtatacagatagacacacagattgatgtaacagactagagagcccagaaagaaagccacacatttatagccaactgatctttgacaaagctgataagaatatacgttgaggaaagcacacccttttcaataattggtgctggaacaattgaattgtcatttgcagaagaataaacctggactcctatttctcactatttctacaaaaatcaattgaagatgaattatagacttaaatatatgtactgaaataataaaaatgtgagaagaaacctagagaaaactcttctggttattgtctagtaaagagttcaagagtatgacttcaaaagtacaggcaacaaaaccaaaaatcgaccagtgcaaatttaaaccaaactgaaaattttaattatataaattcaaaagctttactgaaacaaaaagctgctgcacagccaaagaaataatcctctcaacagagtgagcagacaaactgcagaacggaagaaattatttgtaaacttttcctttgacaaaagactaataccgagagtaaacaaagatctcaactacaacagaaaactccaaagaatcccattaaaaagtcggcaaaggacataaagagacttttttattttttatcttatttatttattcatttgtttttatgagacaggtctttctctattacccatgctgtagtgcagtgccatgatcttggctcactgcgacctgtgcctaccgggttcaagcaattcctgtgccttaacctcctgagtaacttgcaccacaggcacgagtcacagcccgtggctgattttttgtatttttagtaaagatggggttttgccttgttggccaggttgatttctgcctctttgcctcaagtgatccattggcctcagcctcccgaagttctggggttacaggcatgctcaaccgcacctggacaggagtcagtttttaaaagagcacatataaatggccaaaaggtatttcaaagaaattctccacaccatgaatcgtcagagaaatggtcattaaaaccacattgaggttgggtgcgctgcctcatgactgtaattccaacactttgggaggctgaggcaggtgtatgatgagctcaagagactgtgatcatcctggccaacatggtgaaaccctgtctttactaaaaatacaaaaaatgagccaggcctgttggcacgcgcctgtagtcccagctactcgggaggctgaggcaggagaattgcttgaacccgggaggtggaggttgcagcaagccacgatcacaccactgcactccagtctggcaacagagtgagaccccgtctcaaaaatatcaacaaccaccacaatgagatatcttactccagtcagaatgggtattatgaaaaagacaaaaacataacaaatgttagtgagaatgtggagaaaaggggaaatcttatgcattgttgttgggaatgtaaattagcgcagattttatggcaaacactatggagatttctgaaagaacaaaaaatataacaactactcagtcctgcagttgcagtactgggtacctactcaaaggaatagatcaaaatgcacacaaatatttgctgcagcattatttacagtagcaaagacatggaatcaccctacatgtcaatcaacagaagaataaataaagaaaatgtggtatgtatacatacaggaatactattcagttataaaacagtgaaaatcatgtcttttgcagcaacctggaaggaactggaggtcattattttgggtaaaacaagccaggcagagaatcccaaatatcacatttttcaggaccagcagggtatttcacacctgtaattcccatgcttttccaaaacagtataagagaattgcttgatgactgggtgacacagtgagaccctatctctgcaaaaacaatatatgtgtatatatatatatatatggagagagagaaatcagctgggcatggaagctgggactacaggtgcgtgccaccacacccgggtaatttttttgtgtgtttttagtagagattgggtatcaacaggttgctctgagtggtcgtgaactcctgagctcaggcaatctgccctccttggcctcccaaagtgctgggattacaggtgtaagccaccactcacagtcttccttccttcctcccttcaggtgattgctcagatgctgcttattcttggaggatatccctgaccaacttatagaattagcgggaaccttatggttgacacatttcctatgttcctcacctgctttcttttcttgtggaggacttacagctgtctgaaatacagcatgtttctttcttgattgcctttctctcctcccgagaatatcagttgcacgaggccagtgactgtttctctcttttctgagtctcctgcaaccaccggtagcatacacatagtgtatccttaatatctccttgttcaaaaggtgaatttcttgaagctggggggcagaggttgcagtgagctgagattgtgccacttgattccagcctgggcgtaagagcaaaacttggtttctggctggggggaaaaaggataaatttctctattcatgaaaaattggacattgggaatcaagtatagccaccttagtttttcagtgataattccagccctgtcaacttgtaggaatcatgtacgatggttccctttgctggaggctattgctgtgtaataaaatatccctaattagtaggaaagaataaccatcattgatttgtgctcacaaatgctgtgaacaagaggttctgatgaggagagtggagatgacttctctgtgtgatctcagctcactgcaacatttgtctcccaggttcaagcttctcctgcctcagcctcccaagtaaattggattacaggcacatgccagcatgcttggctaatttttgtatttttagtagagacagggtttcatcatgttgaccaggccggtctcaaactcctgaccccaggagatcagctcgcctcagtctctcaaagtgcaggaaatacagatgtacaccactacacccactcttaagtttttacttatgaataataacactgacagtgttctaaattctctaaatggtcaaatggataaagaaataagacccaacttatggtgccttaaagaaatcaacttcatctatagagacaccgaaagggaaatgaaaacagggaaatggaaaaggatatttcatgaagctggaaaccaaaaaagtgccagagtagctattctcatattagataaaatagactaaaatcacagactgtaacaacaaaagacaaggagggtcactagttaatgataaagaggtaaatcggcaagaggataccacaatgattaatacctaggtacgtgacaccagttttttcaaatgtaaaaagcaaacatagattgccattccaagatggccgaataggagcaactccggtctgcagctcccagcctgatccacacagaagatgggtgatttctgcatttccaactgaggtaccttgttcatctcattgggctggttggacagtggatgcagcccatggagggctagctgaagcagggtggggcattgcgtcaccgggaagcacaaggggttaggggatttacctttcctagatgagggaacccgtgacagactgtactgggaaaattgggacactcccaccttaatactgtgcttttccaatggtcttagcaaatggcacaccaggagattatatcctgtgcctggctcagtgggtcccacgcccatggagcctcgctcactgctagcacagcagtctgagatggaactgcaaggcggcagactgggtgggggaggggtgttcaccatttctgaggcttcagtaggtaaacaaagtggtctggaagctcgaactgggaggagcccaccgcagctcaatgaggcctgcctgcctctgtagactccatctgtaggggcagggcatagctgaataaaaggcagcagaaatttctgcagacttaaacatccccatctgacagcactgaagagagcagtggctctcctagcatagtgtttgagctctgtgaatggacaggctgccttctcaagtgggtccctaacccccatctagcctaactgggagacacctcccagtaggggccaactgacacctcatacagccaggcacccctttgagacgaagcttccagaggaaggatcaggcagcaatatttgctgttgtgcaatatttgctattctgcagcctccgctggtgatacccaggcaaacagggtctggagtggacctccggcaaactccaacagacctgcagctgaggaacctgactgttcgaaggaaaactaacaaacagaaaggaacagcatcaacatcaacaaaaaggacatccacaccaaaaccccatctctaggtcaccattatcaaagaccaaaggtagataaaaccacaaagatggggagaaaccagagcagaaaagctgaaaattctataaaccagagcacctcttctcctccaaaggatcgcagctcctcaccagcaatggaacaaagctggatggagaatgactttgacaagttgacagaagcaggcttcagaaggtcagtaataacaaacatctctgagctaaaggggatgttcaaacccatcacaaggaagctaaaaaccttgaaaaaagattagacgaatggctaagtagagaaaacaatgtacagaagaccttaaatgacctgatagagctgaaaaccatggcatgagaactacatgatgcatgcaataccttcagtagccgatttgatgaagtggaagaaagtatataagtgaatgaagatcaaattaatgaaatgaagtgagaagagaagtttagaggaaagagagtaaaaagaaacaaacaaagcctccaagaaatatggaactatgtgaaaagattaaatctacgtttgattagtgtacctgaaagtgatggggagaatggaaccaagctggaaaacactcttcaggatattacccaggagaacttctgcaacctagcaaggcaggccaacattcaaattcaggaaatacagagaatgccacaaagatactcctcaagaagagcaactccaagacacataattgtcagattcaccaaagttgaaatgaaggaaaaaatgttaagggcagccagagagaaaggtcgggttacccacaaagggaagcccatcagactaacggctgatctcttggcagaaactctagaagccagaagacagtgggggccaatattcaacattcttaaagaaaagaattttcaacccagaatttcatatccagccaaactaagcttcataagtgaaggagaaataaaatcctttacagacaagcaaatgctgagggattttgtcaccaccagacctgccctaaaagagctcctgaaggaagcgctaaacatggaaaggaacagtcagtaccagccactgcaaaaacatgccaaattgtaaagaccatcaaggctaggaagaaaccgcatcaaccaatgagcaaaataaccagctaacatcataacgacaggatcaaattcacacataacaatattaaccttaaatgtaaatgggctaaatgctccaattaaaagacacagactggcaaattggataaagagtcaagacccatcagtgtgctgtattcaggaaacccatctcacgtgcagagacacacataagctcaaaataaagggatggaggaagatctaccaagaaaatggaaaacaaaaaaaggcaggtgttgcaatcctagtctctgataaaacaggctttaaaccaacaaatatcgtaagagacaaaaaaggccattacataatggtaaagggatcaattcaacaagaagagctaactatcctaaatatatatgcacccaatacaggagcacccagattcataaagcaagtcctgagtgacctacaaagagacttagactcccacacaataataatgggagactttaacaccccactgtcaacattagacagatcaatgagacagaaagttaacaaggatacccaggatttgaactcagctctgcaccaagcggacctaatagacatctacagaactctccaccccaaatcaacagaatatacatttttttcagcatcacaccacacctattccaaaattgaccacatacttggaagtaaagctctcctcagcaaatgtaaaagaacagaaattataacaaactgtctctcagaccacagtgcaatcaaactagaactcaggattaagaaactcactcaaaaccgctcaactacatggaaactgaacaacctgctcctgaatgactactgggtacataacaaaatgaaggcagaaataaagatgttctttgaaaccaacgagaaaaaagacacaacataccacaatctctgggacacattcaaagcagtgtgtagagggaaatttataacactaaatgcccacaagagaaagcaggaaagatccaaaattgacaccctaacatcacaattaaaagaactagaaaagcaagagcaaacacattcaaaagctagcagaaggcaagaaataactaaaatcagagcagaactgaaggaaatagagacacaaaaaacccttcaaaaaattaatgaatccaggagctggttttttaaaaggatcaacaaaattgatagaccggtagcaagactaataaagaaaaaaagagagaagaatcaaatagatgcaataaaaaatgataaaggtgatatcaccactgatcccacagaaatacaaactaccatcagagaatactacaaacacctctacgcaaataaactagaaaatctagaagaaatggataaattcctggacacatacaccttcccaagactaaaccaggaagaagttgaatctctgaatagagcaataacaggatctgaaattgtggcaataatcaatagcttaccaaccaaaaacagtccaggaccagatggattcacagcccaattctaccagaggtacaaggaggaactggtaccattcctcctgaaactattccaatcaatagaaaaagagggaatcctccctaactcattttatgaggccagcatcatcctgataccaaagccaggcagagacacaaccaaaaaagagaattttagaccaatatccttgatgaacattgatgcaaaagtcctcagtaaaatactggcaaaccgaatccagcagcacatcaaaaagcttatccaccatgatcaagtgggcttcatccctgggatgcaaggctggttcaatatatgcaaatcaataaatgtaatccagcatataaacagacccaaagacaaaaaccacatgattatctcaatagatgcagaaaaggcctttgacaaaattcaacaacccttcatgctgaaaactctcaataattaggtattgatgggacatatctcaaaataataagagctatctatgacaaacccacagccaatatcatactgaatgggcaaaaactggaagcattccctttgaaaactggcacaagacagggatgccctctctcaccactcctattcaacatagtgttggaagttctggccagggcaattaggcaggagaaggaaataaagggtattcaattaggaaaagaggaagtcaaattgtccctgtttgcagacgacatgattgtatatctagaaaacccattgtctcagcccaaaatctccttaagctgataagcaacttcagcaaagtctcaggatacaaaatcaatgtacaaaaatcacaagcattcttatacaccaataacagacaaacagagagccaaatcatgagtgaactcccattcacaattgcttcaaagggaataaaatacctaggaacccaacttacaagggatgtgaaggacctcttcaaggagaactaaaaccactgctcaatgaaataaaagaggatacaaacaaatggaagaacattccatgctcatgggtaggaagaatcaatatcgtgaaaatggccatactgcccaaggtaatttatagattcaatgccatccccatcaagctaccaatgactttcttcacagaattggaaaaaactactttaaagttcacatggaaccaaaaaagaccccgcattgcaaagtcaatcctaagccaaaagagcaaagctggaggcatcatgctacctgacttcaaactatactacaaggctacagtaaccaaaacagcatggtactggtaccaaaacagagatatagaccaatgcaacagaacagagtcctcagaaataatgtcacatatctacaactatctgatctttgacacacctgacaaaaacaagaagtggggaaaggattccctatttaataaatggttctgggaaaacaggctagccatatgtagaaaggtgaaactggatcccttccttacaccttatacaaaaattaattcaagatggattaaagacttacatgttagacctcaaaccataaaaaccctagaagaaaacccaggcatttccattcaggtcataggcacgggcaaggacttcatgtctaaaacaccaaaagcaatggcaacaaaagccaaaattgacaaatgggatctaattaaactaaagagcttctgcacagcaaaagaaactaccatcagagtgaacaggtaacctgcagaatgggagaaaattttcacaacctactcatctgacaaagggctaatatccagaatctacaatgaactcaaacaaatttacaagaaaaaaacaaacaaccccatcaaaaagtgggtgaaggatatgaacagacatttctcaaaagaagacatttatgcagccaaaaaacacatgaagaaatgctcatcatcactggccatcagagaaatgcaaatcaaagccacagtgagataccatctcacaccagttagaatggcgatcattaaaaagtcaggaaacaacaggtgctggagaggatgtggagaaataggaacacttttacactgttggtgggactgtaaactagttcaaccactgtggaagtcagtgtggcgattcctcagtgatctagagctagaaataccatttgacccagccatcccattactgggtatatacccaaaggattataaatcatgctgctataaagacacacgcacacgtatgtttattgcggcactcttcacaatagcaaagacttggaaccaacccaaatatccaacaatgatagactggatgaagaaaatgtggcacatatacaccatggaatactatgcagccataaaaaatgatgagttcgtgtcctttgtagggacatggatgaagctggaaaccatcattctcagcaaactatcacaaggacaaaaaaccaaataccgcatgttctcactcataggggggaactgaacaatgagaacacatggacacaggaaggggaacatcacacaccggggactgttgtggggtgggggaggggggaaggatagcattaggagatatacctaatgctaaatgacgagttaatgggtgcagcacaccaacttcacacatgtatacatatgtaacaaatctgcacgttgtgcacatgtaccctaaaacttaaagtataataataataaaattaaaaatgaaatgaaataaaataaaataatgtgttgtaagatggtatttgcaaacttcacggtcacctccaaccaaaaaaacctactattttcttttattatactttatttatttacagatgatgtatttatttacatcattatttacagatttacagatgatgtatttatttacatcattatttacagatgatgtatttatttacagatgatgtatgatatctcctttaagtgggtaaaaatttgagagcagaaaactcttgttttgtttgttgccatatccataacacctggcccaaggcctggcatgaagtagctgctttgtcaatatgccattgaatgaatatttgaatgaatgaatgaactatgtggtttgggtaatcctcactgagaagattacatgcaagctgagacctgaatgataaaagaagatcattcaggagatctgggagatctgggtgaagaggatatggcttgaagccactgcacgtgcaaaggccctgaggcaggggtgagcttcgcagggaggtggagcagcaggcaggaggccagtgtggatgaatccaagggagtgaggggaagagtgggaaaggatgagggccaggtctagaccaggatgaggcacagaagggttttgccactttctccactgacagtgaagccttcgtgctcaccctgtgagtatgggtgcacgtgtgatgtcgacaactaaggtgtgtggggaaggtgaatttatttgaatttattcaaaacttgataagcaaatttatgaaaagttaacttatcttgtcttatcaacccaggactaatgtttcaataattagcttggaaaaatgaggagttagcctctatgacttgtgtaatagcagtgaaagctctctgttccaggttagggagggatggagtagcccagtttcagaccccaagtgggtgaagaggtgtccatgggagagtgtctcagtgtgagtgtcagagcccatacaagagtagagccctccatggaggtgccacttggggtgggacctcagagtccgagcaggccatgaggccatccacacaggggcagtccagcacatggagtcagagtcaggcatggagaaaaggacatcattaatagggcctctggatgtcatacccttctcagactaagtatttctgccctaattatataccaggatctgaccctcttgcagatgatagtcaatgattcttgacaggagagtaattgcaccacttttctggtggtctcttgacgcaagagaacaaacacactgaaaagaaatggcaagtcaacgtttaaagcaacttctttgtcccttgttgaaaccattctctttctggggtatagacctctaaacccagaactctaacatcttttttgttcgttttttgttttttttttcaagacagaagttttgttctgcttgcccaggtggagtgcaaaggcaggatcgggtcactgcagtctctgccttttgggttcaagcgattctccagcctcagcctcccgagcagctgggattacaggtgctggccccaataccttgctaatttttgtatttttagtagggacggggtttcaccatcttggccaggctggtctcgaacttttggcctcagtggattcacctgtctaggcctcccaaagtgttggcagtacaggtgaaagccactgcacccagcccacaacactaaaatctacaaggatgggaagcccaaagctttcaaatgggcttcgtggatgaaggtgaatgagtgggaatattcccatttcccccatctggatcacaggcccatgtgttccaacttgtagaaatacaggaccataaaatggcattttcctttttattagaggatatgcccagcatgcctcaggctgttgcatttctgaacacttcacagatatggcacatcgctgaaaggcagagacatggaaaatccccatgaccatcaaactcttacacttcagtatagatttgttatgagcagagctaggactacaaggaatgtcattctcaccattggatgtcattggtatcagtgtcgacaggtatgcactttcagcctttggaactcgctgtgtgatccttaggttttcagaaaccttaccatttcctgtccatcagacctggtaatgacattgttatcagtagaatggagattgggctgggtgcagtggctcaggcttgtaatctcagcactttgaggccaaggtgcttggatcacttacgctcaggagtttgagtccagcctgaataacatggtgagagcacgtctctacaaaatatacaaaaactagcccagcatgtcgctgtgtgtctgtagttcaagccacttaggaggctgaggtgagaggatgccttgagcctggaagctcaagactacagtcagcccagatagccccactgtacgtcagcctggctgatggagtaagatgttgtctcatcaacaacaacaacaacaacaaaatttgaatggagaatggagctgtgtattatgttgcagaatgttctgatgggcttggttcctcaggactacttggatggctaatgagagagacgggaagacagagagcttgagattgtgaataaatactgctgttgttctcatgtcaatgccaatattacagatccaccttcctgaagagttttgcaaaacatggattttgcagaccaacaatgcatacagtgtgaccgaggttgtgttatttattgctatggtgagagaaaacatccatcacagctgctacagtggggtcacacctgatgacgtttgcattaccttcctgccatctgccatcatccttctggattttgaagataccagactggtgaattccatgaaacagatgactggacccacagcactggtccttgagtttttgatggtggtgctcatctctgccatctatatacaggaaataatttgccttgagatttgatattggtttttattgattatgttgtcttggatgagcattgatagacttaggctttccatttgcaattgtttttttcctaaaattataagtcatagctcacaggccacaaaaacactgtaagtatttttcctgtttctaagtctatgactcctgattatacatgagagcctaggaacataaccacagaggagagaggttcacaaacagagttcactcacttagaggcagaagttggcaaggaatacatcaatttcctgacccccacccttaggccattactctaacaggggtcatggtgatgtttccaaaccatgggttttatgccaacaaggccttcttggccaagagcttctaaaagacaacaatactcacctttgttcagtgctcagttacctaagcaaatgactgtaggtcttttccaagggaaactggagaattccaaacttgtacaccttccttggttttgcataaacctgcctcatgagaacccagcctctttttgagttaggccttctcgtgtgagaactgtctcagattttaactgtatgaaggatgatgactttctaaggggctgctgacatctgccttctgttcctcttgatgatttctatttcctgttaatgcagggacacacctgtctgccatttatatctgttgtcgctaatgaaacacgctctaagaggtaagtcctagatattgtagggcagtccccccgtgatgtactctggcactggtgtcacctccttatacccccttgcattgatggcaaagtgctggcctctgccattcccacatcctctcaccactttggtgctatggatggagcccatctctgtatcagtgtcccctgctttgagctctgacctatgaagaatgtccagcccttgcatctcagtgatgctggtgtccctctcactggtgcagtggtcatgggcagtctttttttttttttttttttttttttttgagacgaagttttggtattttttcccatgctggagcgtagtggtgtgattacaggcatccagcacaacgccggtctaattttttgtatttttagtagagacaggttttcaccatgttggccaggctggtctctaactcctgacttcaggcgatccacccacctcagcctcccaaagtgctggggttacaggcatgagtcaccccgcccggccatcatgggtagggttcaagatcatagtcagctcctggttctccttctatagtagacccaatccaggatgcccactgattgaggttggagctgtgtccccacccacacctcatatggaattgtaatccccactgttggaggtggggctggctgcgctggtgacagttgagtggattatggaggcggatatttcatgaataatttagcaccatcccataggtgctgtccggtgatggagttctcaaaagatctacttgtttgaaagtgtgtatcacctctcctaccacttgctccagctctggccgtggaagatgagcctgcttcccttgtactttttgccatgactctaactattctggggcctccccagaagttgagctgatggccagcatcatactttttgtacagcctgtggaaccatgacccaattaaacctgagttttataaataattacccagtctcaggtaattctttatagcagtgcatgaacagactaacacatgcacttctcaactatgttattctttaccccaaagctatccatctgtacaatttggatctgagcctaaccacctgcagtgagcccacactcctctggttctgggcatatttttccactagcctaacctcacatccagtgctagccccaatttggcaatctcaggtcacttacactaccctccaacttgccacaaattcaaaagttcccatcactctcagggtgactatggagctagcatcattcacacaactcaaaaaaatcactctgtttgttttacagtgttataacagctaaaatatacaaatccaaagaagccaaagagacaaacaaatagggctgggtcagaaaggatcccagacagatgactccactgcctcctcaaggcagggtgagggggaatgcatctcccggctccactgatgatggtctctttgtgatgaagctttgttcctgggtctcagttgtacatgtcctttggctctaggagaagatgatgctttccaactctcaaacctgatttatttcttatttttttggaagcagaatctcactctgttggccaggtgggagtgtgtgcagtggcacaatcatacctcattgtaacccctaagtccctgactcaggtgatttttttatctcatgctccccattagctagatctacaagtacaggtgcgtgccaccaagcccatctaatttttaagaaaattttgttgtagagatgaggtcttgctctggtgtccaggctggtctggaactcctggactcaaaagatcctacctcttcaagcttcccccgaatctctggattatagatgtgagccaccacatctagtcccaactctcacactttaaattgctgagtgacaggtgacagcctgacttttcctctttcaatgcatcaatggcactcgtttgcagccatccaattccacattcatatcgctattatttacctacaatcttccaaaccaaaagcaatgtaccttcagtgcttctaccgtagttcatccaaaattaccccaggtgaaacatcggtggtttcacagtggtcacatgccctagcgactctgtcctccaactgccagcagtgattgttgctcactgaagtcctgtggggagtcatccaaccccagaatccatacttagggttgacttcccaggaccattgccagtagcaattgatagctcatggtttctagaagcagagcatgagatagggaatcaagatgtgcattgagggagtgctcccgatagctcaggcagggcagctcaaggaaaccaggtaacatcaggtctggctgaagacctgcttaagcctgatcccaagcaggctctggagcacagccttcagcacagaggtggcctcatcttggtcaccctgaggtttctgtgccagtgattccctggctgctagctgttgccaggaagggggtgattaacaaccatctgggccatgtgactgcacgacaactgagtgcaaatctctctaggagaggcacctaccaggtgtgaaggaggatcctggggaagggggtctgggcacagccattcctgtaaatggctttcaggaaacacatgagaatctttgggatgttggaaattaggggtggacattgagagaacaaaatgtccatggaaaatattataaatgtccatggaaagacaaaacgctgggcagaaaggcagtgaaagatcataagggctccataacgtcctccgtgtgacaaagagttcattaagacaagggaggaaccctagaccctgcttaaaaggacgtggcttcagggagagctcctgtgggcacactcagagttgaggtaaaactcctgggattttgtctaattccagtgtactgggtaggggtagacttttggcaatgtgaggtcaggggtatcagatgaaggggtcaacaaatgcctggacaggattcacgaagatgagagggacgttcgaattcctaaaaagctggtggtcaaaagaatgaggatgaagaggagggtgtcctgaaacctcggagccagaagtggggctgaaggcaagaagcctttcaagggaagaagggagtttggaaagagatggatatcaggccagaaaccttcccccaacctggtgccccaaagcattctaaaaacgggggtgggacacagaagaggttgtctgagcagaggaggatcccggaagccagcgtgggggaaggaagagggtatgaggctggcatgaagtggggactagagaaagggtgagtagttttcagagaaaaggccagtgtccagggctgtccaggagcgaatctggtcacttgttctgaaacaggggtccgggtctggcagtggcagcatggtggggtgggtgagtggcactatggaagagccaaatctccacctctatcctcaaagcctttcttccacacagctttccggttagcaaggctccatgagaatggttagttcctgaaaatagtggaccccagaagggctgactaggagcgtgggcatagggagagggaggggatccagggcccggaggaccttgccagagcgtgtagcccgcagaattgaggaaacgagagtgggggtggggatcagatcccagcatttatggagtgactgcagcccagaaaggtggaaaaaactaagaaggggaccccaagggcttgaaagaccttgccgagtgtggagccctgaagtgcgcaggccactcggttgtccctcaggggcctgggaacctcgcggagtgtggagtctctagaacgcagtccactccgctggggaggtggatttcaggccagaaaccttcagggacctggagccccaacacatgctaaaaacaggggtagggacacagatctgaaagattttggagtacttggaaggcagaagggaaacttgaataagtcagggtggagcgctcagaagatggcggagacagccgagctggaagaatccagaaagagaggcggggacaggggatgggggctcagacgcattcagagcgcacagggcccctccaaggtcgctttcacactgccgggttttcctctgcggctgcagagctgcacttttcctctgtcccaaccaaaatgtgacccttgaaggtctcatcccccatggactgtatctgggcctcatttattcaggggcctcagtcctcaaggaggccattgtcactctccttcccgatagagtcctctcaaattagtaagggcccctcaaggagcccagggtttgtctttatccctccctgaaacttcttcggaaggaggaagttcccaaacacccccaggctttagtgccagaatttcaccctctgaaacctcctccttccctagacccagtccggctcctcatcctcagtccctcagaccccatggaggtgtcccctgcagtgggttttctccagattgagagcctcccctcctcagcacacaacccagagactcaccctgttctgagcagcgagccaccgcataagcagacatgagacctcactccagtcaaataacactttatttttgtaaattcaattgttttgttcccggaggaaagggaggagctcaggagaacagtgtcgtcaaaatttcctggtggttgtttaatcacagccgccgagtaggtcagaaaactcatccggattaccctcttcctcctgaaattaaaggaaatgtgcaggactcatcaactggtaaggtttcgtgacaattgtgcgaatatcgtgctggatatatgaatagaaagttaaatctgaacgacctgtgctgcttgtccagacatcatcttcttcaggaaatatgagatgtttctgaagagtttcagcagcttgtcaggaaaggactctgccttttccagtacatagatgagcatcatctggattagagacctcaacacggcgaatacaatttccgttgctagttttgggacacatgtcatgaattggtcggcacaccatttttctaacatatcggtcagaatactggccactttaggcactatctcttccttggccaggttctttataagtgaaataaatgagcccatgatatgtgcaatgagcgtgctgttggtttcaggcaaagttatataatgagagcgttcctggagagtggaggcattttacagaaggtcacgtggtgggggcgggccaagatggccaattagaagcagctgccttccactgagtgaaaagaaaagcccggggatttttttttttttttttttttttttgagacggagtctcgctctgtcgcccaggctggagtgcagtggcgggatctcggctcactgcaagctccgcctcccgaagcccggggattttgaagtcagcgcgtcaactgaaatattcaggttctcacattgggactgactaggcaaacaacttgacccgggagaacaaagaaaagagggatggatgatgattcaccctgtattggcagagagccaaaggaaccatctccggcatccgagggaaacagtgactgagcgtgtgaccccgccccagaaaccatgcttctcccatggatctttgcaacccatggatcaggagatcccctcttgagctcaggtcataagggccttgggtccaggacacagggctgtgtggagtgttggcagagcagccgctcagacacacatagagacccaggagtttcacatactctggccttgggatgccgggaaaggtgggagttccgtctatacattcccccaggaagggggctgaattcagctgctttaggagtttttaaaacattattttaggcagacagagaggaaaaggggtccttgggaagttttgtttctttttaaagcagttccagaaaagagtcttgtctagcaggaaagccctggcttttagagttctctggtaagctttgattggcaaatgctggccattagaaactgggtccgcccaaacatggggattcccgcccgcttctggcccttgcccctccctgtgtacacaccctgtgatattgggagtaatataatcctctcccctcctgaatattacgaacaatatcacaggggattttacaccttctgtgatattgggaataatagcatcctctcctccttttatattaggaacaatatcccagggggtgtgtacaccctttgcgatattgggactactatcatcctcttccccactggatattaggaacaatatcaccggggggtgtacatgtcctgcaattttggaagtagtatcatcctctcttgccttttatattacaaacattgttacaaagggatgtacatcctctgcgatattgaaagtaatatcatcgtctcccccattggatattatgaacaatattacaaggaggagtacacacagggtgttaattatattgggagtaatattatcctctccccccttaatattacaaacaatatcacaggagggtgtacaccccccatgatcttgggattaatataatcctctccctccttggatatgacaaacgatatcacaaagtgtgtgtacaccccatgcgatatgagaggtagcataatccaagagaggattataatatctcttggatatcaggaaccatatcacaggggaatatacaccccgtgtgatatggggagtagtagtatcctctttctccctgaatattacaaacaatataacagggggatgtacactctccgcgatatggaaagtaatatcatcctctcctacattggatattatgaaccatatcacaggggggtgtacacccactgcgatatggggagtagtatcctcctctccacctttggatattatgaacaatatcacagaagggtgtacacttcctgagatattcggagtaatatcatcctcttttcacctggatattatgaacactatcacagcggggtgtacaccctctgtgacatggggaataatataattttctcctcccctggatattaccaaaagtatcacaggggggtgtacatcccctgtgatatgaggagtagtatcatcttctcctcccctgaatattaggaacaatgtcacagaggggtatacaccccctgcgatatgaggagtaatatcatcctttccacccttggatattatgaacaatatcacagggggtgtacacacaggttgtttactatattgggagtaatatcatcatccccctctatattataaagaatatcacagggggttgtacaccacctgcaatattgggagtaatatcatcccctccccctctggatattatgaacaatatcactggggactgtatccccccaagatattgaagataatatcatcctcttccctttggatattacaaaccacagagaggtgtacaccccctgcgatatggggagtaatattaacctctccttccctggatattacaaaccatatcacatgggggagtacacaccccgtgatatggagagtaatgtcaccctctctcttcctgaatattatgaaccatataaaaacccctgcgatatggggagtaatattaccttctcctcagcttaatattaggaaccatatcacaaaagggtatacactccccgcgatatggggagtaatatcacccagtataccccctggatattacaaaccatatcacatcgtggtgtacgcctcccatgatatggaaagtaatatcaccttcccccttcatagatattacaaaccaggccaggtgcagtggctcacgcctgtaatcccagcactttgggaggccgaggcaggtggatcatctgaggtcaggagttctagaccagcctggccaacatggtgaaaccccttctctactaaaaatacaaaaagtagccgggcgtggtggtgtgcgcctgtaatcccaacttcttgggggaccaaggcaggagaatcgcttgaacccgggaggctgaggttgcagtgagccgagatccggccatcatactccagcctgggggacaagagcgagacttcgtctcaaaaaaaaaaatgtagatattacaaaccatatcacattggggtgtatgcctcccgcgatatggggagtaatatcaccctctcctccctgggatattatgaaccatatcacataagtgtgtatgccccactcgatattgagagtaatgtaaccctctccccaactcagtgtaacaaaccatacaacagggggttgtacacccccagcaatatggagattaatatcaccctctcttcttctggatattatgaatcatatcacaggcgatgtacatgccccgagatacagggagtaataccaccttattccaccctggatattatgaaccatatcacagaggggtgtacaccccccacgatatgggagtaatatcaccctctccccttttggatattacgaactgtatttcacgggagtgtacacccttggcgatatggaaagcaatatcacctctcttaacctgaatattatgaaccatatcacaggtgggtgcacacccaccacgatgtggggagtaatgtcaccctctccttctctggatattactaaccgtataacacctccttcgatattgggagcaatattaccctctcccctcctggatattacgaaccatattcaaagggtggtgtacattccctggaatatggggagtaatatcaccctcttttcttctggatattatgaaccatatcacaggggagtgtacgccatccgagatacagggagtaatattactctctcccccgctgaatattacaaaccatatcacagggtggtgtgtgttccccgcgatatgaggagtaatatcaccctcttttcttcgggatattatgaaccatatcacagaggggtgtacgcccccgcaatatgggaagtaatatcaccctctccccgtctggatattacgaatcatatcacagaaaagtgtacgaccccacgatatggagagtaatatctccctctccgcccccgggatatcacaaaccatatcacaggggtgtatatgccccccgcgacatggagagtaatatctccctctcccctccgggatattatgaaccatatcatagtggggtgtatgccccacgtgatatggggagtaatatcaccctctccaccccaagatattatgaaccatttaacggggaggggtgtatgccaccgcgatatggggagtaatatcattttcttcctcctgggatgttacaaaccatatcacgtgggggtgtaccctgatatgtaacgtgatatggggagtaatagtaccctctccccccggggatactgtaaaccatttcccagggaagtgtacaccccccggtgatatagggagtaatatcaccctctccaccccgggatattgtgaaccatatcactgggagggtgtagcccccgcgacagggaaagtaatatcattgtctcctccttggggtatttcgaacatgtcacgagggtgtgtaacccctcactcggtatgtggagtaatatcaccctctccctccctgtatattatgagccatatcacacccaggtgtaggcccccggtgatatggggagaaatatcaccctctcagcccccgggatattacgaaccatgtcacaggggagtgtatgttccctgcaatatgaaaagtaatattgcactcttttccctgaagtattactaaccttgccacagaagggcgtatgctcttcgctgtatggggagtaatattaccctctaccccctcccccaccgggatatttcgaaccatgtcacaaaggagtatatggccctcgcgatatggggagtaatatcacactctccccccaaggatattatgaaccatatcacaggggggagtactccttcgcgatatggagagtaatatcaccctatccaccctgggatattacaaaccatatcaccaggggatgtaaacttcccgtgatgtggggagtaatatcaactccttcccttaagatattttgaaccgaggcggaagtaagggtgagaggaggctgcaacgccgatcggaggaggcaggaaccggagctctagcagtagctgggtgggcaccatggctgggatcaccaccatcgaggcggtgaagcgcaagatccaggttctgcagcagcaggcagatgatgcagaggagcgagctgagcgcctccagcgagaagttgagggagaaaggtgggcccgggaacaggctgaggctgaggtggcctccttgaacgtgggatccagctggttgaagaggagctggaccgtgctcaggagcacctggctactgccctgcaaaagctggaagaagcggaaaaagctgctgatgagagtgagagaggtaagaaggttattgaaaaccgggccttaaaagatgaagaaaagatggaactccaggaaatccaactcagagaagctaagcacattgcagaagaggcagataggaagtatgaagaggtggctcgtaagttggtgatcattgaaggagacttggaacgcacagaggaacgagctgagctggcagaatccctttgccgagagatggatgagcagattagactgatggaccagaacctgaagtgtctgagtgctgctgaagaaaagtactctcaaaaagaagacaaatatgaggaagagatcaagattcttactgataaaataaaggaggcggagacccatgctgagtttgctgagagatcggtagccaagctggaaaagacaattgatgacttggaagataaactgaaatgcaccaaaggggagcacctctgtacacaaaggatgctggaccagactctgcttgacctgaatgagatgtagaacgcctcagtctcaccctgctgctgctcctccctctgaaccagactccgcctgaggccagcctgcccgaagctgacctttaattgagggctgatctttaactggaaggctgctttctcctttcgccgccccctccttccgccgcccgctccttccctgtgtctttttcaccaaactgtccgcctcttcccggagattccagctgggctagaggctgagcacctttggaaacaacatttaagggaatgtgagcacaatgcataatgtctttaaaaagtatgttgtgatgtacacattttgtaattacctcttttgttgttttgtagcaaccttttgtaaaacattccatataataccacagccctgaagcagcgatcgaatccctttctcacttttggaaggtgacttttcaccttaatgcatattcctctctccatggaggagaggaaaaggtataggcctgccttgctgagagccaaacagagcccagggagactccactatgggaagcctcattgctctgtacaaagtactagctaagccagaaaggtggttccaggaggagttagccaaacaacaacaacaaaaaatgtgctgttcaagttttcagctttaagatacctttggataatgttatttctattttttatttttttcattagaagtgaccaaattaagatggcaagacctctgagaccaaaattttgttccatctctaccccctcccaactgcttacagaatggatcatgttccccttatgttgaggtgagcacttaattgcttttcttgcctccttgaaagaaagaaagaaagaaagaagattgtgtttttgccactgatttagccatgtgaaactcatctcattacccttttctgagtttgaagctgctgtctctacaagtgccatctcattgtgctttgtatcagtcagtgctggagaaatcttgaatagcttatgtacaaaactttttaaattttatattattttgaaactttgcttctttgggtttgtggcaccctggccaccccatctggctgtgacagcccctgcagtccgtgggctggcagtttgttgatcttttaaagtttctttccctaccctgtccccattttctggtaaggtttctaggaggtctgttaggtgtacatcctacagcttattggcttaatatgtactctcctttgatgtggtctacttggggccgattgggagaaagagaaatcaatagtgcaactgttttgttaatgaatattgacaagtgtctttttgaaataaagaaccagtccttcaaaaaaaaaagacattttgaaccatatcacaggggggtgtatgtccctgcaatatggggagtaatatcactctctcccctctgggatattacaaaccatatcacaggagggtgtacgtccccacaatatggggagtaatattaccctctcctccctggatattatgaaccaaaccacagggggcttatgccacccgcgatatggagcataatatcttcctctactccccggaatattatgaactgtatcacaggggagtgtatgcccttcacaatacgaagagtaatattaccctctcccccatgggatattacgaaccatgtcacaccccttgcgatatgggaagtaatatccctgtctttccttccggatattctgaaccatatcacagggggatatacaccccctgggatatggggagtaatatcgttctccttgggccatgcgtggtggctcacatctgtaatctcagcacttttggaggccgaggcggatggatcacagggtcaggagttcgagatcagcctggccaatatggtgaaaccccgtctctaataaaaatacaaaaattagccagacgttgtggggtgcgcctgtagtcccagctattcaggaggctgggagaggagaattgcttgagtccaggaggcgggggttgcagtgagccaagatcgtgccactgcactccaacctgggtgacacagtgagactcaaaaaaaaaaaatcattctcatttccccccctggatattacaaactgtttcacaggtaaatgtagaccacctgcgatatggtgagtaatatcaccctcctctccttccctggatattacagaccatatcgccgggggtgtactccccctcccgtgtacacccccggcgatatggggagtaatatcactctcctgtttccttttggatattatgaacttgatcaaagagggatgtactcccaccgagatatggggagtaatatcaccctcctcatccccctggatattccaaaccatatcacaggggggtgggcaccacccgcgatgtggggagtaatatcaccctctcttctattacaaacaatattacaggggtatgtacacttcccgcgatatggggagtaatattaccctcacccaccctggatattatgaaccatatcacaggagagtgtacatcccccaagatgtggagagtgatagcagcctccttccccaggatattatgaaccataacacacccccggcaatatgaggagtaatatcaccctctcccgacctggatattacgaaccatgtcacaggagggtgtacatgccccgagatatggggagtaacattaccctctcctcccctggatattacaaaccatgttacaacccccgtgatatggtgagtaatatcacccactatatcccctagatattacaaaccatatcacaggaaggtgtacgccccccacaatatggggagtaatatcaatctctccccttctggatattacgaaccatatcacagggaagggtatacctcccatgatatgggaagtaatatcaccctctccaacttggatattatgaaccatatcataaaggggtgtctgcacccagcaatatggaaagtaatatcaccttttcctcccctagatattacaaaccatatcacagggggggtgtatgccctctgcaatacggggattaatatcaccctcttcttttctggttattatgaaccatatcacaggggttgtatgtccccccgcaatatggggaataatatcaccctctcccccctggatattaggaaccatatcacagggaagtgtactcccttcatgatatggaaacgactcctcctctgccccctggatattactaattataccacagaagagtgcacgccccctgattatcacacctcccaagatatgtggagtaatatcatcgtcctctacccttctggatattatgaaccatatcacagggggttgtacacccttcgcgatatgaggagcaatatcaccctcctctctcccctggatattatgaactatatcacaggggagtttacaacacccgcgatatggggagtaaatatcactctcctctcccccgcctggatattatgaaccacgtcacagggcgtgtgtacacttcacttcaactttttcccttaagttgtacacatcaacttcttcctttgagatactatgaaccagatcacgggggtgtatgctccccgcgatatggggagtaatatcaccctcgccccccaaagatattacaaaccatatcacagggggctgtacgtctccacaatatggggagtaatattaccctctcccccctggatattataagccaaaccatagggggttgtaggccacccgcgatatagggcatagtatcttcctccactctccggaatattatgagctatatcacaggggggtgtatgcccttcgcgatatggggagtaatatcaccttctcccctcgggatataaagaaccacatcacaaaaaagtggacgccttccacgatatggggagtgatatcaccctcatctgcccccctggatattaccaaccacatcacaaaggggtgtacacccccccgatattgggagtaatgtcaccctcctttttcactctggatattctgaaccatatcacagggagttgtacaccgcctgcgatatgaggagtaatatagtaatagcatcttctccacccctggatattaggaacaaaatcacaaggaaagtgtacattccctgcgatattgaaagtaaaatcatccttcccccatattgcatattagaaacaatatcacagctcgggtgtataccccctgcgatattgggagcaatatcatcctctgcctcctggatattagaaaaaatatcacaagggggtgtatacgactcctgagatattgggagtaacatcattctctcccaccctgaatattaggaacaatatcacaggggggtgtacaccctctccaatattgagagtaatattatcctgccaccccaccccccagatattaggaacaaaattacagggaaaatgtacgccctgtgatattggaaataatactattttttatttctctggatattaggaacaatatcacggggggtgtacaccctctgcgatattgggaataatattatcctctgcccccctggatattggaacaatatcaaaggggggtgtacacccctgtcaatattaagggtaatatcatactctccctttcctgatattaggaaaaatatcacaaaggaggtgttcacccctgcaatattgggagtaacatgattttctcctctactggatatgagaaacaatatcacaggggtagtgtacacgctcagtattgaaagtaatatcatcttctcactccctggatattagcaacaatataacagggaaggtgaacacttcttgcgatattgtgagtaatattatcttctactccgccggatgtaggtgtacatcccctgcgatattgggagtaatatgattctctccccctctgggtattaggaacaatatcacggagtggggggagacaccacccgcgatattgggagtaatattatcctgtcattctcctggatattaggaacaatatcataagggagtgtacacctcctgtgatattgatagtaatatcaccctcattttccctagatattagaaacaatatcacaggttggggtgtacaccccctgtgatcctgagtgtaatatcctctccctccctggatattggaagcaatatcacagaaagggtgtacagtctttgcgatattgggagtaatatcatcctctccctcatggatattaagaacaatatcaaagaaggcctgtacacaccctgtgacattgggagtaatatcatcttctcttcctctggatattagaaacaatatcacacggagggtgtatagccctgggatatttggagtaatattatcctctcccaccctggatattaaaaacaatatcacagtgggggtgtaatccccctgcgatattgggagtaatatcatcctctccccccagatattagaaactatataaaaagaagggtgtacaccccatgcgatattggaaggaatattattttctccaaccttgaatattaaaaacaatatcacagggggctctacaccccctgctgcaatacagtgagtaatattaccctccttcgtcctgaacattaggaagaatatcacaaggggagtttacatctcctgtgatgttgggagtaataccatcctctcctccactgcatattagaaacaatatctcagggaaggtgtacacccctgcgatattgggagtaatataatcatttacccctctggatattaggaacaatatcacaggacaggtatacatttcttgtaatattaggagtaatatcatcctctttccttctggatattaggaaaaatatcacagggggagtgtatgtccccttcgattttaggagtaatattatcttctccacccctggatattagaagaaacaatatcacatagggttgtacagcccctgcgatattaggagtaatatcatctcctttccccctggatattaggaacaatatcaaagggaggttgtacaccttctacaatatttaaagtaatatcatctcctccgctggatactaggaacaatatcacaggaggtgtgcacaccccctgcgatattgagagtaatataattttctcccatccttgatattagaaacaatatcacggggagatgtacacccattgtgatatgtgatattaggagtaatatcattttctcccttcctggatattaggaaaaatatcatagtgggagtgtaagttccctgcgattttaagagtaatagcatcccctccccccctggatattaggaagaatatcacagaagcgatgtacaccccctgtgatattgggattaatatcatcctctctcttcctggatattaggatcaatatcacagggaagtgtacacaccctgcgatatttggagttatattattcttttcctttttgaatatgagaaacaatatcacagggccgttggacaccccctacaatattgcgagtaataccatcctctcaccgctggatattagaaacaacatcacaaggggctgtacaccttctgtgatattgacagtaatatcatcctcttctttcttagatataacaaacaatatcacaggaggagtgtacacccactgttgatattgggagtaatattatcacagggcgtgcgtgcaacccctgcaatattgggagcaatgtcatcctctcttactctggatattaggaacaatatcacggggggtgtatacagcctgcaatattgggagtaacatcattctttgcctccctggatattaagaatgatatcatggggggcctgtacaccccctgcgatattgggagtaatatcagcctttcaccctttggatataaaaaacaatatcacggggatggtgtacaccctctgctgtatttggagtagtagcattcttttctccatgaatattaggaacaatatctcaggaggagtgtacgtcccctgtgattttgggagtaatattatcctctccccctggatattagcaacaatatcacaggggtggtgtacaccccctgcgatactgggagtaatatcattctctcctttcctggatgttaggaataatatcacaaagaggatgtacaccttctgtgatattgggggtaatatccttacccacataaatattaggaaatatatcacaggggggtgtacatatcctgcgatattggaagtagttcattctttcccgcctggatattatgaacagtatcccaggggtgtgtacactctgtgatattgggggtaatgtcatcttctacccccctggatattataaacaatatcacaggggatgtacacacaggatgtttacgttattttgagtaatatcatcctctccacccctggatattacaaacaatatcacagggaggtgcacatcccctgaaatattggcaattatatcatccttttctcccctggatattacgaacaatatcacaggggggtgtacaccccctgtgatactcggagtgatatcatcctctccttttctagatatttcaaagaatatcacagggaccgtacaccacctgcaatattgggagtaatatcatcctctccttttctggatatgatgaacaataaatatcactagtgggtggacacccccggtgatattgggagtaatgttatcctgtcttcccctggatattatgaacaatatggcaaaggggtgtacactccctgggatattgggagtaatagcatcctctttcattccggatattgggaacaatatcacaggagagtgtacacccccttcgatattggaagtaatattatcatatttttttcctgtattttaagaacaatatcatcttctccattctgaatattaccaacaatattacagggggatgaacgtcccctgagatattaagactaatataattttctctccccctagatattacgaacaatatcacagggggttgtactccccctgctatattggaaataatagcattctcttttcttcttggtattacaaacaagatcacaggggggtgtacactccccacgattttgggagctatatcatcctttccccctctggatattcggaacaatatcacagggagtgtgcaccccctgcgatattgggagtaacattatcctctccccagagcgcctctgcccggcctctgaaccgtctgggaagtgaggagcgcctctgcccggcagccccaccatctgggaaatgaggagagtctctgcccggagtccaagtgtctgggaagtgaggagcgcctctgcccagccgccccactgtcagggaagtgaggagtgcctcagctcggcggccacaccatctgggaagtgaggagcacctctgcatggccacaccaccgtctgggaagtgaggatcgcctctagcctgccgccccaccatgtgggaagtgaggagcgcctctgctgggccgccctaccctctgagaagtgaggatcgcctctgcccggctgccccaccatctgggaagtgtggagcgcctctggcttgccgctgctccgtttgggaagtgaggagtgcctctgccaggcctgcaaaccgtctgggcagtgaggagcacctctgcccggcagccccctgttctgggaagtgaggagcacctctgcccggctcctgcaacatctcggaagtgaggagcacctctgcccggctgcctcaccgtctggggagtgaggagcgcctctgcccggccactgtgcaaccctccaattgtgaagtggcagccttctgtttgatctttctgcccttctcaagtttgcatttttgacattaaagtttacttttaaaataaaaaaattatcttctccccttctggatattacaaacaatatcacaagaaggttacaccccttgagctattgtaaggaatagcatcctctccctaccttgatattacaaacaatatcatatggggctacacaccccctgtgatattggaagtaatatcatcctctccccttctggattttatggacaatatcacaaaagggtgtgcaccttctacgatattgtgagtaatatcatcctctacccccctggatattatgaaccatatcatatgggggtgtacacttcccaccatatggggagtaatagcaacctctccccttccggatattacgaaccatactacagggcggtgtacaccctccacgatatggggagtaatagcattctctcccgtcgtggatattacaaactataccacaaagaggtgtacactccctgtgatatggggataattacaccttctctccctccttgattttacgatccgtactacaagggggtgtacactccccgcaatatggggagtaatagcacctactcccccgctggatattaggaaccaaaggggggtgtacacccctctctataaggggagtcacagtgtagcaggaggagccgcggacaaaatcccacagacaccgaggtagtgaaggaagtggcttttaatcagctggaagcatcagcagactagagtatcaaaatccaagcttgttgagtgcacaatttctgtcctttttaagggctcacaacactaaggtttttacatgaaagggccatgattgattgagcaatctagtgggtatgtgacaagggctgcatgcaccagtactcagagtgaaacagaacagaacaagaaatttcacaatgtccttccatacaatgtctggaatctatggataacatcagttgctaggtcatgggttgaattttaactttcaggctaaggtcaggaaggcccaggcctggtttcgggtctggttttggatctggtgcctggcgccgggctgcctgcctttggtttcgcttccttgtttcttcttaaaacaggtactgagtataaaataatacagaacaatatggggggggtcttttgctctcttctctcaatagcaccccttacctgggatattacaaaacataccatagaggggtgtacgcctcctgcaaaatggggaataatagcaccctctcttaccctggatatttcgaaccataccacagggaggtgcactccccccgcgatatggggagtaatagcaccctcaatcccctggatattgtgaaccgtaccacaggggagtgtacatttccagcgatatgaggggtaataacaccctcttcgttcccggagattacaaaacataccacacgggggtgtacacaccccgcgatatgggaagtaatagcatcctctttccccctggatattaggaaccgtaccgcagcagggtgtacatgcctcgcgatatggggaataatagcaccctttccctccctggatattatgaaccataccacaggggggtgtacaccccttgcaatatggaaagtaatagcaccctctttccttctggatattaggaaacataccaaagaggggtgtacaccccctgcgatattgaaagtaatattatcttgctcccttctggatactaggaacaatatcacaggggagtgtacatgccctgtgatgttttgagtaatatcatcctctcccctttgaatgttaggatcaatatcacagggaggtgtacacgttctgcgatattgggagtaatatcatcctctacttttctggatattaggaacagtatcacagaagatgtgaacactccctgctatatatccagtaatatcaacctctcccctcctggatatcaagaataatataaccggggggtgtaccccacctctgatattggaagtaatatcatcctctctccctctatatattatgaacaatatctcagagagggtgtatgccccctgcgatattgggcgtaatatcatactctcttcccctggatattaaaaacaatatcacagggggaataggcaccacctgagatattgggagtaatatcatcctctcccttaaaggatattaggaacaatacataggggtggtgtacacctcctgtgatattataagttatatcatcctctcttcccccaaaatattaggaacaatattacaggggcgttgtacaccttctgggatatggagagcaatgtcatcctcttttccattggatattaggaacaatataaaaggggggtggacacaccctgcgatattggcagtaatatcatcttttccctcctggatattaagaaaaatataacaagagaggtgtacacttcctgcgacattgagagtgatatcgtcctcccccgcatggatattaggaacaatatcacaggttggtgcacaccccctgcgatattgggactaatatcatcctctccccgcccgaatatttggaacaatatcacaggggggtgtacacccccctgcaatattgagagtaatattctctcttcctgtggatattaggaacgatatcacaggagaggtgtacacaccctgagatattgggagtaatattttcatctttccttttgaatattaggaacaatagcagggtggggtacacaccctgtgatattggcagtaatgtcatccttcttccccctgggtattagaaacaatataacaggggaagtgtacaccctctccgatattgggagtaatatcatcctcttccctgctggatattaggaacaacatgacacggtgggtgtacacttcctggaaaatgggattaatatcatcctctttcttcctggatattaggaacactaccaaaggggaagtgtaaccccctgcaatattggtagtaatatcatcctctttttccctgattattatgaagaatatcacagcgggggtgtacaatttctgcgatattgagaataatagcatcctctcctccctccccaaatactagaaacaatatcccaggataagtgtacaccctctgcgatattgggcataatatcacactcttttcccctggatattagaaacaatatcataggtggggtgtacaccccctgggagtaatatcatcctcaccacttctggatattaggaacaatatcacaggaggtgtgtacaccccttgctgcaatgggagtaatatcatgtaccttccccctggatattgaaaactataccacaggaaaggtgtacaaaccctgtgatattgaaagtaatattatcttctttccccctgagtattaggaacaataccacatggggtgtgtacaccccctgccatattgggagtaatattattttcccctcgcctggatataaggaacaatatcacaggaggggtgtacacccccagcgatattgaaagcaatatcatctcctcccctcttgatattaaaaacaatatcaccggaggagttcacacccctgtgatatggagactaatatcattttctccccaccgaagtattaagaacaatatcatgggggggtgtgtacaccttttgtgatattgggagtaatatcatccttttccaacctgtatattaaaaaccatatcacagggggtgtgtacaccccctgtaatattcacaataatatcatcgttttcttccctggctattaggaacaatatcacaatggtggtgtacaccccctgtgatattgggagtaacatcatcctcttcccttttggatactgtgaacaatcccacaggggagaggtacaccccctgcgatattgggagtaatatcctctcccgtcatggatattaggaacaatatcacaggagcggtgtacaccccctgcgatattgggagtaatatcattttctcccaacctaactagcacaatatcacagggggtgttcgccccctgccatattgagagtaatgtcatcctctcccctcctggatatgaaaaacaatatcacagtggggccgtgcaccccctgcgatattgggagtaatatcatcctctctaccccctggatatgaggaacaatattacaaaggggtgtacaccccctggaatattcacagcaatatcattgtttcccttcctggatattaggaacagtatcacaaggggggtgtagacctccagcgatattgggagtaatatcatgctctctccttctttatattagaaacaatatcacggggaggggtgtacaccacctgcgatatcatcctctttacccctggatattaggaacaatatcacttgtggggtgtacttctcctgtgatatcgggcataataatatcctctcccccctgaatattaagaacaatataacagggggacagcacaacccctgtgatattgaaagtaatatcatcctctgcttccctgaatattaggaacattatcacggggggggggggtgtacactccctgctatattgggagtaatataatcctctccctccctgaatattaggaacaatatcacaaggggggtgtacaaccccttctatatgagaagtaatatcatcctcttccttcctttatatatatttttttccattgaaagttgtttatttctctgatgtaagtgagctaagtcactacagcattaaaatctcttttctagaacaacgtaaagaacaatgtatacacatcttaaatttggtaggtcacaaaagttagaatgcaatcatcttttgaggcaacaagaaaataaataaataaaaattaaacactttaacccaaaatttggtattgacaaatcagtagtgtcaacttcacatatgaaggacaatacagtctggttatttaaagatgctcaatatgtcatggtatttgggctaaagatacttagaatattgcgtttcctttttgattaaaggaatacaatgcaatcaccatcaagctgctatcataactcatttttagctgtggtaaagtgaccatttggtccatggcacaagttacatatatcacacttctgtcaaactgaaaccttgtaagatttcatgtttataagctacaatacaccctgaccaagctgtcagtcccctcacggttttttagaaaaatatctacatttgtccttatggatgtcaaaatgttacaccatcatttgttaaaaaaaaaaaaaaaagatgcacattcatactgtgaagttattaggaaaatactcttgcaaacaaactatataaagataaaacacgcttcaaaagtatgtggtttgttttcttgtttgtctgttttacaatattctataaagtgcagagtcctaagggaaaaaactactccctataacaatagttcaattacagcagcttttgcatagcaatacttagagaaagttggacactacagtttcttcaggaagagaaggatggaagagtatcttctgattcagattgttttttggccataagtctgctttcttcaggaatggttgctgatgccaaatctccgttaagtgtattttatgaacagtgaacaggtctatctgggtcttcaagaggaatatcactacaagaatctgtatctgagtaggttcttcggcgtcgctgggagagtcggtgaagtgcagatactggttcttttatacagtggctactcctccctggtgcaagaaccagggtggctgacagaacgcttcctcatttgaacaggagaaggtgacacaggagaaactaagggatccggatggtgccgttgaaacatctcaggtttaaacctggcattggctatcttcacacattcctcaagcgttgtgatgaacgtgttacacgtggcactaagcagagaagaggcttcattgatgttctctgcactaggagatgaatgattctcatcgtggtgaacaaattcctgtatcgtatgaacttgctgcattaagaggtcacagtagaggcgaagttcagacattttggttttcagcgattcactggtttcacttctttctttttcgtttttagtccttgtatcagtcaaacatgctttggagctccccagagcgaccagccacctctgtctttcagctgcgttcactgccttcatgtagaaatgctgctctccaggaatgattaattccattcttgtgttgtctgctgaatgaacagaatttatgtatccaatcaagggtggtcccctccaaagctgtcacctttaatttcacaaactgccatctttatgcttcctttgctccctttgcaaacatcatcttgtgaatcataataggataagattccattatctaaaacaaaccaacgaggctgccaacctgtgagatagttggtccacttgtacaaaaccccctccatgcttcagagccccacaccgctcatcctcccggcccggcgccggccgcggtgatggggtaggcgcggggcctggggcagcctttcccggcccgcccgggccccctccgccggcacgaagccgctttctgcctgcgcgcgccgcagggacgtggcggcccttagaggccgggacagcgggcgcagcgtggagcttgggggccgcgaggcgcgggctcagacatccccgggtaagcctcggcggcggcggccgcgacaacggcaaaaatgcgactgcgaccgcgaccggtctcgtgctcgcgcttccgcggcccggctgctccctccggcgccccggcgctgcctcttcctcgcctgccttccttccccctgggctccccgtttgtttttcgaccttcctttatattaggaacaatatcacaagtgggggtgtacaccccctgcaatattaggagtaatattatcctctctttttctagatattagaacaatatcacaggggaagtatacattccctgtgatattgcgagtaatattctctctctcttctaaatatttgcaacaatatcacagaaaaggtgtacaacccctacgatattgggagtattactattctcttccccctggatattagaaacaatattacaggttaaatgtacacttcctgcgatactgggaggaatatcattctcttttgctctggatattaggaacaatgtcacaagggggatgtacactctctgagatattgaaagtaatttaattatctccccccgcccccggctattaggaacaatatcacagggggcggtgtacaccctctgcaatatttagagaaatataattctctttcccctcgatttcaagaacaatatcacaggggatgcgtgtacaccccctgcgatattgggagtaatatcatcctctgtccctctaaatattaggaacaatatcatgggtggtgtacacaccctgcgatattggcaataatgtcatcctctccttttctgcatactaggaacaacataatgggggagtgtacacctcctgcaatattaggagtaatatcatcttcttccgccatggttattaggagcaatatcacagaaggttttataacccctgtgatattgggagtaatatcatccttccccccacgtatatcccagccttgatattaggaacaatattacaggggaggtgtataccccctgctataaggggagtaacataatcccctttcttcctggatattaggagtaatatcacccgttttccacctgaatattagaaacaatatcatagggaaggtgtatatcccctgagacattgggagtaatattattttctcctcgcttggatattagaaacaatatcacagggggtgtgttcaccccctgcgatattgggagtaatattatcttctctcctgcggatattaggacaatatcacaaagggggtgtacactccctggaatattcacactaacatcatcgtttacttccctgaatattagggacaatatcacaaggggagactacaccccctgcgatattgggtgtaatatcatcgtctcccccatggatattaagaacaatattatcggaagtgtgtacactctctgcgatatttggactaatatcattttctcccaacctaaatattaacaacaatatcacgggggtgtacagcccctgcaatattgaaagtaatattatcctcttccccctggatattagtaacaatatcacgggggaggtgtacaccccttgcgatactggaagtgatatcatcctctcccagtcttgatattagaaacaatgttacagggaggcgtataccgtctgctataatgggagcaatatcatcctctttcttcctggatattaggagaaatatcacaggggttgtgtacaacccctgcgatattgaaagtaacatcatcttctttccctctgaatattaggaacgatatgatggggaaggtgtacaccccctgcggtattgagagtgatatcattttctcctcgcttggatattagaaacaacatcacaggaggggtgtacacccactgcgatattgggagtaatataatcctctcccacccctggatattaggaacaatattagaatattaggaaggtgtacactccctggaatatttacagtaatatcatcctttccttcccaggatattaggaaaaatatcattttctcccaacctaaatattaataacaacatcatagagggtgtacagcccctgcaatattgaaagtaatatcatcctctacctccctggatattaggaacaatatcacagggcatgtacacctcctgcgatattgggagtaatggcatcctttcccatccttgatattagaaaaatatcagagagggggtacacactccctgcaaaaattgaaagtaatatcctctccaccgctggatattaggagcaatataacgggggagggcctgtatacaccctgcaatattgggagcaatattattttctccttcactggattttaggaacaatatcacagtgtgggtgtaaaccccctgcgatattgggagtaacaacatcctctttccccatggatattaaatacaatatcacaggaggggtgtacactctcttcgatattgggagtaatattcttctttcttttccttgatgtaaggaacaatatcagaggggggtgtacaccacctgcaatattgggagtaatatcatcctttccctttctggatattaggaacaatatcacaagaaatgtgtacactggctgcaatactggaagtaatataatcctctcccttcctggatattagaaacaatatcccaaaagggatgtacactcccagcgatattgaaagtcatataatcgtctgcttccctggatattatgaagaacatcacagggtgggtgtccactttctgcgatattgagagtaatatcttcctctctcctcctgaatattacgaacaatattgcatggaggatgtacctcccttgcgatattgggagtaatatcctcctctctcccccttgatattaggaacaatatcatgggggagtagtgtacacatcctgcgatattgggactaatgtcatttccccccactcggatcataggaacaatgtaacagggaaagtgcacaccccctgtgatattgggggtaatatcatcctctcccgccctggatattaggaacaatatcacagggcgttgtactccttctgcgattttaggaacaatatcatactgtccccttttgtatattaggaacaaatcacagggttgtacgccccctgcgatattgagagtaatattgtcccattctcccctgtatattaagaaccatgtcacagagtgtgtgtacaccccctgccatattctgagtaatatcatcctctccccctcctgatattaggaacaatatcataggcatgggtacacaccctgcaatattaagagtaatatcatcctctccctccctgggtgttatatcatcctctcttccactggatattaggaacaatgtcacagagagtgtgtacacccgtgtgatattgaaagtaatatcatcgtctccctccctggatattaggaatccaaagtcttttccacagcattctaatccacatggatcattctcaaaaatagatcacatggacacagggaggggaacatcacacaccaggtcctgtcagagggtggaggttaggggagggatagcattatgagaagtacctaatgtagatgacaggttaatgggagcagcaaaccaccatggcacgtgtatacctatgtaacaaaactgcacggtctacacatgtaccccacaacttaaagtttaataaaaaaaaaaagtagaccatatgttaggtcacaaaacacatcttaaaatgtgaaaaaaaattgaaataatatcaagcatcttcttgaaccatagtggaataaaactagaaattgatcacaagaggtattttggaaactatgtaagtacatggaagtttaaaaatatgctcccaaatgatcagttgctcaatgaagaaattaagaaaaatattgaaaaatttctgacacaattgataatggaaacacaacataacaaagcctatgagatacagcaaaagcagaactaagaaggaagtttatagctgtaagtggttacatcttatgacataatgaggacatgcttacgtcttatggtgtagagaggaagaacttcaaataaacaatctaacaatgcacattaaagagctagagaggcaataagcataccaaagctaaaatgagaagaagatagaataaagcttagagtttaaataaataaaatggaaataaaaaatacagaaatcaatgaaagaagaagttgatttcttgaaaatttaaacaaaattaggctgggcgcagtggctcatgcctgtaatcccagcactttgggaggctgaggcaggtggattatgaagtcaagagatcgagaccatcctggccaacatggtgaaaacccgtgtctactaaaaatacaaaaattagctgggagtggtggcacttgcctgtagtcccagctatttgggagggtgaggcaggagaattgcttgaacctgggagacggaggttccagtgagccaagatcacaccactacactccagcctggtggcagagcgagacaaacaaaagaaaaagttcaacaaaattaagaaattattaggcagcctaagtaagaaaaaaaggggcaggatccaaataaatacaatcaaaaatgaagaaggagacattataattggtactgcaggaactcaaatgacgattagaggctacaatgggcaattatgtgccaataaatttgaaaatctaaaagaaatggacaaattcctagatacacacagcctaccaagattaaataaggaacaaattcaaaacatgaatagaccaataacaagtaacgagattgaagccataataaacagccttccactaaagaaaagcccggggcccaatgacttcacttcggaattctaccaaatatttaaagaaccaacaccagtcttattcaaattattctaaaaaataaaaggggatggaacactactacccagataccaaaaccagacatagacacatcaaaacaaacaaacaaacaaacaacaaaacaaagaaaaaagaaaaaaaaagaaactgcaggccaatatctctgatgaatattgatgcaaaaatcctcaacaaaataccagcaaacggaattcaagaatgcattaaaaattcatttgtcatgatcaagtggaattcatgcccaggatgcaaggacagtgcaccatatggaaatcatcaacatgatacatcatatcaagagaatgaaggacaaaaagcatatgatcgtttcaactgaaactgaaaaacgtttgataaagttcaacatcacttcataacaaaaaccctgaaaaaactacatacacagggaacataccccaacataataaaagccataaatgacagatgcacagctaatatcatactgaatgaggaaaaatgaaagcctttcctctaagatctggacgataacaagaaataatgcagcgcttgaggacattttttattcttctctgtttctctcgctaaagcatttcctacacaatatttggtctctgaaccatggggcagaatggttattttgctttgttaattttatagacacttaaacttaacagggttcaccactccataccaaaatttggtgaaccccaaggaccaaatcacattattggaagtaacagtgaaacccaagcacacttcccacacactgaaaatgctgagtttgacctgagtcctagtatcccagccaagagggttcccaaaagaaatgaatcctctagggcttgccactaggagccttctgttgtctttctgagtgagggatagggtgcacaagaaagttttcttccaccttcttctttttttgtgtatgagaaagtgttggaaataattgcttcttcttcagtgctgcaaggaagaatcagcatttagaccaaaagttttctcagcaagacaactttaatttctttagaaagggtgttgctcatcagctgagagcaccccaaacaaagggagacaggaatatttatctgttaagcatgaggtcgctactgctgtgtgctatctccattggctggggttggacctcacagtctatgctacatccaactggctaagaacctaaaactgtcctcaataggtaaagatagtggagacaaagaaaaagaggaagttgcttacaagaatgcttataggagtaacagcatttcccaataaggaaaggatataaggtatgggctggaacatgcctgggcacattcacgcatgcctgagcttgctagaacaagcactgaggttagagtataaatatatataatatgcttcttccattactcttgcctcataaagcttaacaaagatttactaccatcaaataaagaagcttgaagaaagtgagtttcaaagaggatatattaattccaacatttatgatttaaagaagaaaactttgaagaggaatgtttttattttccacagacagattatcactctaatgcctaggctagagtgcagtggcatgatcttcgctcattacaaactctggctcccagattcaagtgattcttgtgcctcagcctcccaaggagttgggattacaggcatgtgccacaataactggctatttttgtatttttagtagagttggggtttctgcacattgcccagggtggtctcaagctgctggcctcaagtgatccacccaactggggctctcaaagtgctgggattacaggctgagcaactgtgcctggctgaaagtgtccattctaaagatagcaaaggcaatgattttgtatcacttcagaatccttccttgaatgttaggcagacttcctcacccactatccctgatttgatttgtgtatccttgctaatgggggttacagctattaattttatttttgtaattgccattgtttggctatttggtgacacatagttcttgttaactggtggttgtcaatttgaagaatccaagagcaggtggagatgcctcaggatgaaaatagaaagcctccagacctgggagaaagaagggtgtatacacctcccgaaaggtagatggggggcagtgtacttgcacaactcactctccagaatgggcttggcagtgtcccagtggaagactatggtagatgatcaagaaaacaaaaagtctgcggaaggagttgagggtcgcagagggaggagaatctattgcagaatacacagtgcagacagaatactcaagggcatggatgaagtgtccttacaatgagggctgagggtctgagaattggatatgaggccattcaggagaggatgggagtctgaatctgttttctgcttagaagtccctccaggacaccagcttgagacaaaggttggaggtataggcattgcaggatgagggtcagccttttccagtggccaggtctggcaaaggtaagatgagagcagcttgctgtcaatgtggctctggcttgggtattgtgagcattgtcagggaaggctacagagagtcagatgagacctgcaggagcccatggcctcctagagacaaggcatcaatttagctaggtgttatagtgtcaccactatgacctgggagttacagtgtcaccactagagacccaacagcaggatgtggaactgagaagtggttgattggttgttcatgggcaggaatatgtgggtgttttggtttgagtaaagagtgggcacaccttagagaatgaagcccccaaaacaccagaaaattggacagggtagggagcctaggtcctggatggctgggggcaagctccaggtggagtgtaactctgagggcatcagatattttctgactcagttgtcatatgggccatatggcacatatatggcacatagggaacatattgcacacttctcttgcagtagcctgctagtgggtggacaatatcctgtgcactgaacagaggcagcaagtgagcagaacaactcatcatgacggctttttgtccttgtctccatgcaagccaggtgttatttctgtggtttcggacgttggtattgatgcacggttttttaaaaggggaggctaaagtcccagagtttggtagactgcacctctccagatgagattttaagagcccccgattttcacacatggggagagtgattgccctcacaaactcttcctcctcattgtggtttctaggttttcactttgtcagacattttgagtttcgatcacaaacactccacgttcacatcacccatgcatgctgcccacccgtatccacaaggctgctgtgtctactctgctcctgttttccaaagcaccccttccatcaggaaatgtgccttccattcctagggatgtcatgattcccagctttcatatctcctcacagaggaggttcccaaattactctgggttctcagtccagaagttgagcctttaaaacccttttctgtcatatggtcagtccgttgcagggtgcagcccctcagcagccaagattccctgtggatagctcttcaatctgattgcctgggctttctccatcatgaaacctttcatctccttggtccttgtcacacaccctgaaccccaaaatagaaaagccacaacagaatgaagtagatgagaaacaatctccttgtttataattccgtttatttcctcacataccagccaagcttctcagtcaggcagacacaatagatggaatggcaagggaagtgaagagtggaggctgcatcccttcagccgccagctgatgttctgcttatttcgcataccggaactcccaggcgtcctcaaaccacaatcacagttgttggttccagaaacatcttctttggaaaaacatgtgacatcagtttcctcagagtcttccggacaatccagtcacacagaactgacaaaaccttgtcaggtgagaagataaggatcttcttcaatacagaatatgtcaacatctccttctgaatagttccgtttatttgctcacataccagccaagcttctcagtcagcaggcacaatagactgaataggaagggaagtgaagagtgaagtctggatccgtttagcctccagctgatgttctgcttatttcctgtactggaactctcagaagtcctcaaaccacaatcacagttgttggttccagaaacatcttctttggaaaaacatgtgacatcagtttcctcagagtctcccggacaatccagtcacgcagaactgacaaaaccttgtccagtaagaaggtaagaatcttcttcaatagagaatacgtcaacgtctccgtgaacgaagagatctgctggttccaaggacttgtcgtggatttctgtcctagatactttcttccgtaattcaagataaagaaaattacaatctctgctgtccattccatcgcttttcccttcagaatcataatcagagaatccttgcagaacgtcgtgagtgtgctctcagctgcaatcaccagaaggactcttcacactcggtgagtcctcctcattttatagaagccaaagcagtgacgtatgctcacccctcccgcccccaggagagaggttgctggccaatgagcttgagcttcgtcatccttccaagccccacccagttcctttgcttccctttcaccaactttgactgaaatgaataggttacaacctttagctttctgccccttggaaaacggaagcatttagacatccgtattaatatttggatctagagtgttcgtgttttagcacttccttttttgaaaggagaagcagacgtgttgtgtttttaggaacacttccaagaagtttctcctcctctatgatgaaaccaacacaagaaagccaaaagggcgtttaaccccttgaagcactgagagtttccctgctgatattcttagactgttctttttctaaaacgagaaagaggtaagttctctttttttttttacactgcccaaaactctctctgctcagtgctgggcactggaaaacaatggccctctctctggaaaccactatctgccatctcaagggcccactacaggtctgcccagcattttcatcccttcctcaagtctggtgcccaggaccctcctctgctctgacagccaggcagcagcactcaaactcccctcccctcttagccttcataccttcagctgcacttctgcctctgcagtgtcaggatgacctccccttcctcctgtccttcctcattcttaagacttcctaccccttctggattaatttatggaaaacctaaataatctctttcaaattttagcccactttttacatgtagattgttttataagatgaattttaacaaaccttttctaagttgttcaaccattttcttttgtctttttgttattttatttcctgaatttaaaatatttgaaaacctctaaacttgacaaaactaattttttcataaaagctatgttctcatgtccttttataaactttgacttaaaatatattttacttgttcagtcagatttgtgtgtgaaaatttttaagtagctttagatacaaatattaattataatggtaactcttaagtatgcatttttagtaaaccacttaggagacaaccaattttaattatgtccttgatgtagagcttaaagaaaaagatggagctgtagaaaacatcttagtcttgaaatatcttactcttcccagtataagggggggcatggccctatttcacaggtgcccaggccttagctagaaatggatggttccaagacatgtcaaaaaactgtttgaaaggttttagaagttgttaatgacatgaaaatatttagtaaaggcagtatttgatctgtctaatttggatccaatatctaaactctgaagacatatttattttattttgctaattttaaaagtggctttattttttaaaataatgtttatgtttctttcaatagtgtgtggaatatatgtggtttttggttatgtggataaaagttccttagtggtaatttctgagattttgaggcatctgtctcctgagcagtgtataatatacccaatatgtcatcatttattcctcatccccctcccaacctttccccgagtccccaagtccattatatcattcttatgcctttgcattctcatagcttaactctcatttaaaagtgaaaacattcaatatttgatttgccattcctcagttacttcacttagaataatggcttccagttccatccaacttgttgcaaaggacattattttgttcctttttattatcaagtattattccatggtgtaccacatttgctttatccactcgttcgttgatgggcacttaagttggtcccatatcactgcaattgcgaatcggctgctataaacatccatattcttgtgtcttttttatggaataacttcttttcctttgggtagatagccagtaatgggattgctggaatgaatggtctacttttagttctttaaggaatccccatactgtttaccatagtggtcggactagtttaaattcccactagcagtgtcaaagtgctcccttttgaccacatctatgccaacatctattgttttctgacttttaaattatgggcttctagcaagattaagatagcatctcattgtggttttgttgtgggatttaggaggatgagagagaggctttgggttaaaacaggagaatcttttattgagtgctctcaggcccagcagactcacgtccaaagacagggcctggaacaaagacagcacttgacttttatacacacttcacaaaagggggtgggccagcttgaagcaagcttacagtggtgtgaaagcagggatacagaggcaggaaaaagacagttaatcaaattgtaacaggttcataactcaggattgcacataactgttgctatgcaacccagatgtctattatctaggttttgctctaaagaggcttgcattggtttatcttcactatggtgcctagagagctgtagttcaggcctgctcaggcttctcatgacctttgccatacttcttagataaaacagaatacttgaagttactagttaaagagaacaagaatctataaactcataccataaaacaaaggaaaatttgtttttcttctccctacattgaaggagtgctggaagagtctccagaatacaataaataatattatcaagacttttcctgggtctgggctgtgcctgttgctgcctctgggacaagttagcttaatacaagaaagcttatttccctttctttttaattttatttttctttaatttcccacctcagttttactttgcatttccctgagaatttttaataagtaaaatacttagaaatatacttaaccaagtaggttaatgtaagtttcctacaaggaaaactacaaaatagtgctgaaagaaatcacagttgacacaaacaaatgggaacacattataagcttatgaataggtagaatcaatattgtgaaagtgaccatactctccaaagccatctacagagcagtagaattctcatcaaaatatcatcattctccttcccagaactagaaaaaagaatcctaaaatttatacaaaaccaaaaacgtgaccgcatatccaaagcaatactttgcaaaaagaacaaatctgaaggcaggctttaaattatactacaaggctacaatcaccaaaatagcatgatactggtataaaatatgcacatagagcaatagaacagaatagagaacccagaaataaagccaaatgcttacagacaactaatcttcaacaaagtacacaaaaacattaattggggaaaggatactttattcaataaatggtgcaggaagtataaaaataggcacatagagcaatggaacagaatagagaacccagaaataaagccaaatgcttacagacaactaatcttcaacaaagtatgcaaaaacactaattggggaaaggacactttattcaataaatggtgcaggaagtataaaaataggcacatagagcaatggaacagaatagagaaccgagaaacaaagcccggtactttcagtcacctgatctttaacaaagcatataaaaacttccatctaagacctgaaagtctaaaaatgctacaagatagcatccaaaaagcttttctagacattggcttaggccaagtagtcatgactaatgccccaaaagcaaacgcaaaaatataaaaatagaataagatcaataggacctaatgaaaccgaaaatcttctgcaaggcagaagaaatatcagcagggtaaacacacaacccacagtataggaaacagtagtcacaaactaggcatctgacaaaggactaatgtccagactccaaaggaactgaaagaaatcagcaagaagaaaaggtgccatttaccaccttcctgactcattggccagaaccaatgttagtggaattaacatatgccccaccccaagtgacttctaaagggctaactcaccacaagggagtcagagcagatcttggactgagacctacaggacacaggtactgctttttctcttttatttgttttaaattttatttatgtttttagatcaaatagttcagattgcattggtttttaatctgctgttgttggattaacatatgctttaagcgactcttaaataggtggctcaccaggagaaaggcatagcagaacctggactgagacctacgggagacaggtattgctttttctcttctaatcattttaaatttaatttaccatctttcatcaaatagctccgatcatatcattattttttcttttctgttttgttggtggttttattggtggagttttattttactattttagaaaagcagtcttttaaaaaagacttttaaaaagttttattactcttttttttaaaaaaattatgttttcccttgatgtgcttatttcctttataaagatcatcaccattaaattactaggagatactgcggctgattttgtcatgcgtgagataagaaattttttgccaaagcaattagtgatgagtgcaatggaaaaatccgtgatgatcttttaagatgattaactttctaatccagaaaatgctgctgtttgtactgaacaaaatagctttatttttatatgaccaggggtacataaaatgcttcaaaacaacacataatttggcaaaaatactatgtcttgccagccagaagaataagtgtggttttatttctatgtatatgtctagtaccatgcctgcactagagttgggaaattttaaaaacatcacctattgatacagaagagaagtgctgggaagggaagggcatggtccctttgaatgatacagaaaaggtgaaggaaagtgatgggtagaggaggccggggtccctggctagggctccaaacctgggcttgtgcccctggacctagatgaggacaggcatttttgttttcctgaccaaatgttgcatttcccaagatcaccctggcccaccatgccctatcctgtgcctaaaaaaaccctgggaccctagcaggcagacacacaggaggttggacgtcgagaggagcacatcagtgcaagaacacatgggtggctgccacttctctccctttcctgagagggaaaaactctcgacgctgagaggaatccaccaacaggcaccagcactctggcaggccaccgaccaatggattgacatagagtttggctggggcagccagaggagagcctgggccgctgaataacccgacttcaggggaaaactattctcccttttggctcccccatctgctgagagctacttccactcaataaaaccttgcactcattctccaagaccacgtgtgatttgatttttctggtacacctaggtaacaaccgcgggatacagaaagccctctgtctttgggttaaggaatgggtctaattgagctggttaccacaaagccacctatagatggcaaaactaaaagagcacatggtaccacatgtccactggggcttcagcagctgtaaacatctacccctagatgctgccatggggttgtagccccacaacttgccagtctgtatgcttccctagaggtttgagcagcggagtactaaagaagcaagccacacccccactccacctcctgtgagggggacaaggaaacttttcccatttcaactggtggctcgtctgggatctcggaaggtgagtgtgagtgaatgggaaactgttgggcctgcctttcttccaaaactctgccacttctctccctttcctgcaggtaaaagactctgttttcctttcatctcttttctctctcacacattatttgaaatggatcttatctcttcctttataatgttaagagttttgctacaggctgaggcaatgttactaagtaaaatgagcatttggctcagccgccaaaggtgcaaatcagaccaatttttcctagaggtgccatgtatgcctccaccttgacagccccaggcatgagcggcttccagggcacctctccttacccttttccctcccagctccagcacctaggcatgcctgcagcaggcaaaggccacacccaatagccatgaaggggcagggggagcaatgtcgcagaagtgtctccctccactgcctgggatgaggggggtgtgagaaaaccgatggtagccaggaccctacagagtgcttctcacccactgcatcaatggaacctttccttccatggccaaggaattcaacctggtctgaactgggggaaggatgggaaagttataaggattagaggggcccacttgcactaagcaaggggttcttcccccagcattccccactttttgcctctttaactgtttttctctttttttcttttctaagtgagaatccccaccgctctgtttctaatagggaagttaacagaggagtgacccctgctggctgataattgcaaattcagcagggcttatttgaggcactaaatggatataaacagcctctgaaatgctttttcagtcccaaactcaattccaagcttcaggctgaggccctagaaagagaaagcaggtctgaggaattcaaagccaggcaacaggcacaatgtaaatggacaggaccaattcctgctgactgaaccccatcccacagaaggaggccatgcctcatgggataaaaaggcccagggaactcaaagtttttcaacagcagggagaaaaggaaacataggtgagggcagttaattcctaatctccaggttctccctgcttcatgggtacataccgcatttgtacctgtggccggcacctgccaaggttgccagggcgcaggggtaagaggtggaaagtgaagtgaagatgcttgctttccctccccatcacaccctgagctttttgccaaaagaaggaagggaaatgaggaacacctctattccctgtctttcagaatgggcagccagttctcctcaccacccccagcttgtactccccttgagtgtatcctgaaccattgggactgttttgaccctcagaatccagaggaaaagcatctcatagccctccgcacataggtttggccaaattatggtttacaggaaggactggcttggcttcaggaagggaccattcatttcaataccatcctgcaattagaacttttctctggatgtgaggacacatggtctgaggccccaaatgtgcaggctttctataccttgcaaagcaatccagacctttgctgacatgtaggattgttccagccctcctgtttgctgtctcggggaaggctgccagggtcaagcccagggaattaaagacacgagtcccagacgcacccccagctgacgtgccagctccctcaagccctgctcctctgggtccaccccaacctccgtatccagcttcagcctctcacctggcccctcctagaaatcttcatcccaaacaagcccagtctcactcttgcccctcctacagatgcccagtgaatttgggcccagtaaggtccaagtcctcttttccctacaagacttaaagcaaattaagggagatctgggcaagtgttcagatgaccctgatagatatatagaagctttccagaatttcaccctaacatttgaactctcctggagagacgttatgttacttttgagtcagaacctgatagacactgagaagcaggctgctctgccagcagcagagagatttggggatgagctttgcatcacctatagcatcagggaagggagcgaatattatccaactggaagagaagtagcaccagtgaaggaccctaaatgggatcccaataatgagatggaagactggaagaggagacactttcaggtgtgcataatagagggcttacgtaggtctaagaccaagcctctcaattatactaagttgtccataattaaccagggatttgatgaaaatcccactgccttcctggagaggctaagagaggccttggtaaatcacacctctctatctcctaattcaatcgagggacagataatcctaaaggataaaattattactcaggcagctcctgacatcaggaggaggttgcagaaatgggacttgggaccagatagtacattagaggacctcctgaaagtagccacctcgatcttttattatagagacccctgggaggaatctgactgccgttttcccccaaaacaatgccccctttcagcaggaagcagctaagactggtcatcatccatattctaatggcagttagatgtacctcttcagagggggcaaatgacatgaaagtgaagtgctgggatgggaagggcatgatccctttgaatgatatagaaaaggtgaagggaagtgttggatacaggaggctgtggtccctggctaaaagctccacacctgggcttgtccccacggacctagatgacaacaggcatttttgttttcctgaccgaatgttgtctttcccaagatcatcctggcctgctaagacccatcctgtgcttataaaaaccccaagaccctagcagtcagacacacaggaggcttgacgtcgagaggagcacatcagcggaggaacacacaggcggctggacatgaagaggaacatgacaacaggcaccagcacaccagcagggcaccgacttatagaacgatgtggattttgcctggggcagtcagaggagagccagggctgctgaacggccccaatccagggagaaaccaatctcctttctggctcccccatctgctgagagctacttccactcaataaaaccttgcactcattctccacgtccacgtgtgacctgattcttctggaatgccaaggcaagaaccctaggatacagaaagccctctgtccttgtgataaggaatgtgtctaattgagctagttaccacaagttgcctataaatggcaaaactaaaagaccacacgaccactggggcttcaggaactgtaaacatccacccctacacactgccagtatgagaaaaatttgctgatatgttttctgctgacctgatgacaatgttcctatggtcacactaaccactgctgggtaattttcatcatgactctcgttttcatctgctgaaaccagcctccccaagaaagacaactattttcaaactgaggaaataaagtgttactaaaccacagtgttctctcatggctgttcctggagttcttcaaaacacttgatattataaaatagaattattacagatcactgtatgttatggatttagtcaaaatgataatttaaaatatggtttaaaataaaaaactttattttccaaagaagatagttttttaaacaagaatatccaataaagacagtatgaggtcagctgactttagtgttggtgtatgtgtatgtgtgtgtgtgtttatagtttaaaaggtaaacaaaaatgctttattatttaatattacgcaaaacttttgtttaaaggagaaaatcaaattttatttttgttgaagttaatttttaataaaattttacgtaaaatctatggaattttaatcagtttgactctaaggtaagatttttataaagtttgcataacatttatagttcttttaaagaatagattaatattctaagaaaaccctgctattctgatacatgaacccaaattaaggccttgtatcagagtgtttttaatgaatgtttaatttctttaaaaacaaaataattccttaaattttaaccaatgcttttttttgtaaaatttttatagaactaatttttacaaatcttttacaacttatttaaaccttgagtcttgtcttgttattttttatttttgaatttaacataactttttagaactgcaaaactagacaaaattactgttttttataaaaactatatgttcatgtctttttataactttttattaaaaatacattctactttttcatatactttgtatgagaaatagttttagttacatatattcattataatgttaactccaagcaactccttttaataataaacttaggatgtatgcaattttgataggtagcagttgcaaagcctactgcaagggtcagagctgtagaaaatgtctctttccagcacagagagggggcatggtgcccttcatttgtccccaggctttagctagaacttaaagctctaaaacagacatgtaattcaattatttaaaagattacaggagttgtttatgacctgaaaatatttactaagggcagtatttgacctgtataatttaaaccaaatgtctaaattctgaagatgttctaattttactttactaataattttaaagcatgctttattttttaaagatttttaaagtcaggtgaattaaaagggatttgagttaaagtttttgtattttctgagaaaatatttaggtgtttagttttctaagccgattaatgagggtttcatcatatattttggtagtgaaacattatgtacacatgagacatctaaatatacagacacacagacagaagcagattttatagatttataactttttaattgttttttaaaatattttccatgatttaaaaaaaaattattattatttgttatttgcctagtcaggctatttgagggccgaaagtagtcaagatctatttgtccaatagagggcgcccctccacgccgctggctttttagggagtccgtcgatggaagacctgtaataaaaataaggttgatggttagggctgctgaggtgatgagccctagatttcttctagttcaggagtctaagtcactccgctcatgcagctaagtcattccccagcccagatccccacatagcatcattctccccctgtcccgcacccagactcacatcaccttcttcctcgtctggactcaaatctctctctctgctccccgctccataaggacacttgggattccattagggtctagccagataaaccagaagaacctcccaacattaagatatttaacttcctcaccttttcaaaaacgcttttgccatagaaagtcactttcaccggttacaggcggtagttcttggttacaggaacttgaaaatgttccctcttcatatttaccagcttttgtaaaaagcatgttttctgtcctgtgtacttgagcatgctaaagtcttgtccccttagtgattccaccttctgttgcccaagcactaggggagggtcctgctgcctcttttcacctctgacatttgcactcttacccaacatggctactgatccgttgaaaaggccgtgaatttaaatttaaaatggtgccatttaccacctccctagttcattggccaggacacttcctatcgggttaacttatgacccaagtgacttctaaaggggtggctcaccgtgagggaggcacagcagaacttggactgagtcctgcaggactcaagtattactttttccctttcatttgttttaaatttcattgacttctttggatcaaatagcttacattgtattgctgttttttttttctttaccattttgttggtgaggttttggtgttgttgctttttttctttctttctttcttttttttttttttttagaaaaagggttaacttctattgccctggctggaatgtagtggtgcaatcacagttcactgcagcccccaactcgtaggcttaagcaatcctcctgtctcagcctcctgagtagctgggactctagacgtttgctaccgtgcctaactttttagaaaattattttaaaaaaatattttaatcctttagaaaaaaatgtgttttccatagattccctgtttttaaatataaagtttattgccattgaaattttaagagatattgtggcacactgtcttatgtatgagataacaaaattcccaccagagcaattaataacaacggaaaaggcaatgacgatgtttaactcgacaattaaattccgaattaagcacatgctgatgtctatactaaaagaaaattcatttttatgcaattagttgtacgtgaaatgtgtcaaagaaatacataatctatgaaataaatgatgcattatcagccagaacaagtaaatttggtttgatatctatgtatacacccagtacaatttctgcactacagttagaaaaacttaaaatacaatataacctatttattgtaaaaggatgatgaaacatgaaatatgaacagcacaaatatgtacaagtatcacttctcaatggaaaaaattacgtataaaaaaaccagcagagtttgtggttgaaatatgaacagcatgaatatgtacaactatcacttctcgatggaaaaaattatgtataaaaaacaacagcagagtttgtggatgcattgataatggtaaatcctgtatgttatggtaaacatcttcatgaaaacacatttacaaacattttctctgctgaatggatgatcatgaaaaggaatttgttatcatcacatttgctggactgagcataatgaaaaggaatatactacgatctggattgttgaacttccatccagagaagaaatttactattgtgctacaagctgcagtaacaatctccttgtgatctcagcaaggcctgcagggcaatttacatcaggactcctcttttcctctccagaacttcacttacctgagaaagagtgtcttttgataaataaaatattattaaatgagtgtggtcttatgactgtttccagggtgatttgcaatgcatgttggggtgagtctctggggtgtgtgctgaggaggggtggcttttaatcttgagagaatgtatgaaagggaaagaaggtctccacagcatctgaggggctaaggaccatgaccctgcctggatttaagaaatgggaaggtttcagagggtgaaattaggtgttgagtcttggggggtgtttgagaagctcctgcctcaggagtggaagctctgggggaagtaaagacaatcctgggtgcctcaatggggcatttcctaatttcagagaaatcaaaccaaaaacagtgaggaaatggactccttgaagactgtggtccatgaatatatgtagggaaaggaaagagagatcagactgtcactgtgtccatgtagaaaggaaagacataagagactccattttgaaaaagacctgtactttgaacaatggctttgctgagatgttgttaatttgtagctttgccccagccactttgacccagccactttgacccaacttggagctcacaaaaacatgtgttgtatgaaatcaaggtttaagggacctagggctgtgcaggatgtgccttgttaacaaaatatttacaagcagtatacttggtaaaggtcattgccattctctagtctcaataaaccaggggcacaatacactgtggaaagccgcagggacctctgcccttgaaagcggggtattgtccaaggtttctccccatgtgatagtctgaaatatggcctcatgggatgagaaggacctgactgtcccccagcccaacacccataaagggtctgtgctgaggtggattagtaaaagaggaaagcctcttgcagtcgagatggaggaaggccactgtctcctgcttgcccctcagaactgaatgtctcggtgtaaaacccaattgtacatttgttcaactctgagataggagaaaagctgccctgtggcgggaggtgagacatgtttgcagtaatactgccttgttattctttactccactgagatgtttgggtggagagaaacataaatctggcctgagtgcacgtccaggcatagtactttcccttgaacttaattatgatatagattcttttgctcacatgtttttcattgaccttctccttattatcaccctgctctcctactacattcctttttgctgaaataatgaaaataataatcaataaaaactgaggaaactcagaggccggtgccggtgcaggcccttggtgtgctgagtgctggtcccctggacccactgttgtttctttatactttgtctctgtgtcttatttcttttctctgtctctcctcccacccaactagaaatacccacaggtgtggagaggcaggccaccccttcaaatatataggacccagaaccagtccattggggaggaagctttcaagggacacattttggctgggaaggaggacagtgaagctctccagccagggaggacgcctggcagtcacagtgatctcggaggggccctgcacacttccaccacttccggttcctcgattcctctccaccacacccattttctgagttctcctgggcaccaggcactggaagccgttcctgctctcattcctcaccccccttttcttcattcttcagggcacgacattctccaacatgttcacatccctcaattttccttccccacctgtctggagtctgaagctccaggcactgcaaggatgtgagttggggacctgtttgttctccccgttttactggatctttcagggtctccattgtccaacttactaggagccctgaatgcttgccgactctaccccatctgctccattctgtgggctgtgtcctctctcaaacctcccaggtctttcaggcccaggccccctcctccacttgcttgtgcccaggctcctacccagcctctgctaggatccagtattgtcaacaataaatagatctccttggaatcagggtaactggcaagctcggttgaaggacgtatgagaggatggaggtggagagttcactctcccaaagtgcccctcacacacacacgcaatggggacaatgccagagcctgaccttatttcacagcaagctgcccaaatctcaccttgctcagtgctggacactgaaaacactgaccctcccagtgaaagctgctctcctctgttcttagtccccacgccaggccactctgcattctgtacccttcccccaggctggtgtcccagaccgtactttacccagagagccctgccctcaaactcacttcctctccggacaggctttctgccttaagctgcgcttcttcctcggtggtagcaggaggccttcctctccctcctccctctatgatttcttgcacctaaatgaatctaaccttgctctcacctttgtcccttgtgccctaacttctgttgacaccttcatctggtgcccctgacataaccctggggctcctgagccctgggacatttgtatctagacaaccacgagcctaacaccctaaacagacacaggcatagacacacacacacacacacacacacacacacccagcaccaaagctgctcctaccccagtcacactggaattagatgaaaaccccaggctttggactccttggctgtgagggtcttcctggaaagagccaggtccagctgcattttctcataccctgaaatcgcaccactacaccccagcctgagcaacagagccagactccatcatttaaaaaaaaaaaaaaagtacccaaaagagttccagaataagataaaaatggtttacatacaatctcgctatctgggaatataaagtgcagttactaaaagcagggaatctctttcctgaaactatttctaactctgtgaggagctgctagattctacagtgcctgacagacagctctcaagggccgtttggcttgtgaatggcatttccaaggcaaacatcttgtttgaaagctgctgctctggttaaagaagggtcatgaaagtctttttttttttccagttatttgggtgaagtatgtttttgcgagcaaatttacctttccctctgcgttctccacattttgggttgtgattttatgacaatatagtttgtatattcaacttatacatatttatagtgttcagtaagagccttttaaaataaaacaattgaacacattggttattttcacaagactctaaccaaaatagtatatttttaggtaaaaacccaggaaaattaactcaaaagtagcctatatggccgatgaattcttgctgcattttatgcaaattatcaggccaagtgtaataagcctaaaattgattttgcacacaaattggtcttactgtaatttctctttaataggaaaaatagggggctacagaccaaccaggatcttcatgaggaccagtgagcacaggagtaggaaaggggtcactagcatcactgagatgcaggtggtggccattcctcatagaaaacgagatttttggggaacctcccatagtgctgagctccatagtgcccacggggatgacagaatctgagaatggctgggaccaggacttttgtcatcaaaagccagctggagggtataggcagtaaaattggaatgcagcaaagggaggctgacctgcaaagcactaggagggatctcataaaacctgttacccttagaggcaagacaggtggaaaaagagtaagtatgtcacttagtagacataatcaagaggagcagaaagccaaggtcagctgtccgccatagaatgtcatgatcccttgctcagtgaagacctgagacagtcctcacaccactatatgtttttctttttataacctttattaaaatacagtttattttttcatttacttggcacatttgtataattgtgaaattgttttcttagtagttttagttacatatactcagtataatgttagcttttaggaacccctctttagtaaaaataaaacaaaaacgtaagcaattttaattggtaggagttgcagagcccacagcaaaggacagagctgtggaaaatgtctgactcttcccagcacggagtcgggccgtggctcctttcacatgtccccagacctcagctagaattgaatgctctaaaacagacaggccagatgattatttaaaatgttttggaaacagtttttgacctgcaaatatttagtaatggcaatatttcacatgtctcatgtggacaaaatgtctacattgtgaagatatttttcttttactttactaataatttttaaaactgactttattgttttaagttttgtaaagtcacatgaactaaaaggcaattgagttaacgtttcaatttttctgataaagacttgattgaagtgtttatttttaagccaatgaatgagagatttatcatatattttgaagtgaaacgctatatacacatgactcatctaaatatacagactgaggtcaattttatagatttagaactttttttatttgttgggcttttaatattttttaaaagctttacatcctttatttttgataatttgtgatttccctggtgcaattatttggagcccacagcagttgggatctgtgtatgcagcagagggtgcccctccaagcctctggctctctaaggcctccttccatttcaagggtaattaaaataaggctgattgttagggattctggtgtgatgaaccccagccctctcccacttctgggggctaagtgtttacatgccatcgccctttgttcccctactgggcctcacatcaccttcttcctcttctggactcaaatctctctctgcttccccttcctaaggacacttgggatttcacgagggtctagctagataagccgggagaacctcccactgttaagataattaacttcctcacattcacaaaagctcctttgccacagaaagtcactctcacaggctacaggtcatagttcgcagttacaggaacttgaaaatattctgccttcaagtccaccagcttttgtaaaaagcatctgtttcctgtcctgtgtagttgagcacactaaagtcttgttcccttagtcattcctccttctgctgcccctgtggggagggtcttgctgcctgtacccacctctgacatttgcactcttagacaacatagccgctaatttgttggaaaggcgttaaattaaaaaaaaaaaagtgctatttaccgcctccctctttgacagaagactgtctgtcaaagtaaccccgccccaagtgactttttaaggggtggctcaccaggagggagtcagagcagaacttggactgagtcctgcaggacacaggtattagcttttctcttttatttgctttatgtttcatttacttctttggatcgaatagctccaattgtattgctgttatttggtttttcattttgttgttgggttttttgatgtggtgtttttttgttttgttttgtttctttttgtctttttagaaagagggtttccctctattgccctggctggagtacagtggtggaatcactgttcactacagcctccaacttattcctgggctcaagcaatccttctgtctccatctcctgagcagctgggactctaggcatttgccaccgtgcccaatttttttttaattcctttttaaaaatattttaatcctttccggaaaaaaatatgttttccatggacttgcttatttcctttatacagtccattgtcgttgaattcttatttgaatttgtgatacaccctctcatagggaacataacaaatttcctcccacagcaattaatgacgagtgcgatgagaagcataatgacaatgattaacttgataattaaaaatctaatcaaccaactgttgatgattgtactaaacaaaataatttcatttttacacaaccagttgtatgtgaactatgttgaaaacaggatgcatgactggcggccagaacaaagaagtttggtttaatttctatctatacacccagtaaaatatctgtaataccactggaaaaccttaaaatacattatctatttcttgtaaaagaatgatgaaatgtgaatttgaacagcataaatatgtacaagtatctcttctcaacggaaaaaattatgtttgtggatgaaatatgaaccgagtttgtggatgaaatatgagcagcatgaatatgcacagatatctctcctcaatggaaaaaatcacgtacaaaatataagaacccagtttgtggatgcgtgaataatgataaattgaggccgggcgcggtggctcacgcctgtaatcccagcactttgggaggctgagatgggcggatgacccgaggtccggagctcaaatccagctcgaccaatgcggtgaaaccccatctctagtaaaaatacgaaaattagccgggtgtggtggcgcatgcctgtaatcccagctactcgggaagctgaggcaggagaaatgcttgaaccctggaggtggaggttaatagtgtgcccagatcgcacgactgcactccagactgggtaacagagtgagactccgcttcaaaaaaacaaaaaacaaagaataataataataacgataaatcctatatgttacggtaaaaatcttcatgagaacaaatttactatcattttttctactgaatggatgatcatgaaaaggaatttatttttatttcgtatgatggactgagcatcatgaaaaaaaatactaccttttggattgttgaacttccatcctgagaaatttactattgtgctgcatgctgcagtgatgatcttgtgatctcagcaatgcccatggggcaatttacatcgggactcgtttcatctctagaccttcacttacctgagaaagacaagtgtcttttgataaataaaatattgttaaatgcaatgttgcctcatgattttttttttcttttccttttcctttttttttttttttttagatgtagtttcactcttcttgcccaggctggagtgtaatggtgcgatcttggctcgctgcaatctctgtctcccaggtttaagtgattctcctgcctcagcctcctgagtagttgagattacaggtacacaccacaatgcccagtgaactttgtatttttagtagagtcgaggtttcaccatgttggcctcgctggtctcgaactcccgacctcaggtgatccacctcctgggcctcccaaagtgctgggattacaggcatgggctaccacgttcagccatgattgtttccagggtgatttgctacacatgttggggtgagtctctgggttgtgtgccgagcaggggaggctctcaatatggagagaacccgtgaagtgggggaggaggtttccatggggtctgagaggctgagggccatgagcctgcctgggtttaggaaatgggaatgtttcacagggtgaacttggggtttgagtcctgagggtgtttgagaacttttttcttcaggaggggaagcttcaggggaaataaagacaatcctggatgcctcaaggggcatttcctaatttcagaaaaatcaaaccaggaacagtatgaaaatggcctccttgaagacggtgttccctgagtacctagaacccaaaaccggtcagttggggaggaagccttcaagggccacattttggctgggaaggaggacagtgaagctctaccgccaggcaggaagcccagccagtgtgttcccagaccaaactcagggtctggctgctatttctcacggcccaataacgagatgcagataaactggggaggaagagagttttttatttctggaaccggttacagagagaaggcccagaaaatatctccagaccaactgtaaattacaaggttttccagagcttatatattttctaagatgtatgtctacgtgtcagtgtgcatttatctaaagatataagtgattaacttcttttaatctgtaactctagtctaagtcttggagacctttctctggagcctcagtacatttacttaaatctaaatgagtccaggtgctggggctattaccctgaccttgtctcctgctcaatcacagaggtttggggggggttcctttagacccccaatgaacttgtttgtggaggcctggcgagtttcttcagacccccaattaaatttgtttaatcctaaacaggtctggttaagaattccttctttgttttgtcatgctgtaaggcccaggaaaggcctaggtaaaacccttggtgggcttttgttacattctagcctttgtagaaaggcgctggcactttcagcttttgatactgaacttaaccactcagtcagtactgaagtagttgtgatggggacctccattagtgaaatctggcctgccacaatccccactgtcaatttgcgcatgatttctatcatgcttgtatatttatttatcacaagaatcatagggagatggagcattgtaatctttctggctacttcctgctgagagggggtcatcgttatggggcaccgaatgcagcactggagtggaaaaagtcgatttgttcccagtagcactctctgtttcgggggtgtagaggcagcacctgctaaaacataatagtaggcaacagcaacacatataaataggttgctgctacttccttcagaagtttcggttgtctagtcttcagttcacagggctttaagaaagcacagcttaggtttcagtgatttccaattaagaaaaatggggaaaaagggaaagaaaaaggaaacaaatgaaaagattatttaggagacttgtagccagagaaatacgaatttaacccaaactgtagaaaataataaaaactgaatgccagactagaatttaaaaacaggtgtactatagtttccaaaagtttttgaaacataacttccctctctccagttacccttttttgttgttgttgttgagatggagtcttgctctgtcacccaggctgtcgtgaagtggcacgatcttgactcactgtaacctccgcttccctgcctcagccccttgagtagctgggattacaggcacccgccatcatgcccggctcatttttgtatttttgtagagatggggtttcaccgtgttggccaggctggtcttgaactcctgacctcagatgatctgcccacctcagcctcccaaagtgctgggattacaggagtgagccactgcacccgaccccagtttcccgtttttactaaagacaaattacgacaggaccaatttgctttattatgctttgccactttatttgtacgaggtgcagcaagaataattatttttcacataggcttttaaaattggttttaatgggactttgttttatagaaggaatctgagataagactttttaaagctgagcccctgccatggatttctaccatcaaatacatatggttgggtgaattcctgtcctcttgaagtttcaagataacttgggattcctgacctgtcagaatgtgacattcttttcttcccacagatcagtaaccctgtacagggactgtgttcacaggatataaggtcagttttccaaaggctttattagctccacaagtcaagtttgattccttaaaggaaagcacagcattctggtcaaaaccttggtaaaataaccagtttttcaaattgtgtcctgttaccaaagaaaacacattcttattgcacttatgcaaataactatattgccataaattaagaatacccacaaatagtttccaaattctggggaaatcgggtagagagaaacaaataatgctccaaatggtgttcataggagtatattttgattaatcgttaaaagctgtcaatagctcaaaagaaaatttgccttgactctgaaaagcaaaacaaaggatcagcaacgttttaagcaaaaagtcaaaaagatcacttcagcctcctattagttcacttcatgcagttaattcctgtcctgcttgatatcaatgaacattttagctctccaagtgtcccgaacatttttcctctcttctgatgtcacaatctccaaagttatcaaaatttgcatttaagagcacctgttagggctttatagctgattataaaattaccttctaaagagggccaaaacaaggtaacatgtgtatatgggtgactgaacgttttagggtagtcatagtcaaagacacaattgacaaggaaatctgttacctctgtggcccacaataatttaacatgacaattataattatgactgataatgtacactgagatatagcagaattataggagtctcccataactttggaaccctcatcaataacatatttatagaaatatagcccaaagaaagctaaaaatcattttatatttcacaatgcttcctgtatgatttttgtaccaaataagccaaatttcacctttacattagtgtactattaatgttaaacctaattcttaataaaacctgatagacatatttacccaattttaatgtttgaccataaggtaacatttttatagactttctataaccctttacaatttttgttaaagagcaggttagtgctctaagagaaacccattgtgtttttatttcaatgctcaatttacagaaatgctgaattataccccttcaactttagtcaatatgtttacacacaaaaatattttaattaattttttcataaacctttcacaacttgcttaaacatttagctttattttatccaacttaaagcaattctttaaccttttaatctaggcaaaaaaaatccatcttctcataagagctttagagactcttaggcttctttactaggacagctgagctctaaagcatgtgaacttcacccaccacaactgtttgctccatctcaagctcagaaccctgccctgtctgcctaaccacaagtgagtatttcctgccttgatttcctgacatttctatatttaattcagcttgttaagttccaagaaatcccctggcaatttttattattgacctcttcttctttgcacaggtatccaacccagtatctacaaataaatgcttcactcatctactcctttcatgaaacattgcaaatctttttcttactagtgcttgggcttgcttttttttttttttttttttctttgcaaggaaacatatagatgagcctcaagagatttagaaatcttttcagagtaaccagctgaatgtcagaaagtcatatttggaggccaatctagttagattagataaatagtttttaattttaacaaactgtcttccttttctaactggacctctgatctcacagaagccaacaaagtatttgcagtttataggatctaattttaaaatatgtgaagagtaggcacatctggaaggcagggcatctagatctttgaaaatcaaaaatcccgaatttcacattgaatctgaggtctctaaaagaagggacatgccacaagaccaagccacacaatttttccacactgcacaatgctgtagaaacatgtcttcaaggctagtagcacagcaacaatcagcccacttttaatcagaccatccccaaaggaaatcatattcattggtggtgttttcacagcctttaaactgtgtccaaactgcacctttctcatctaaacttgcaaagaaacaaggagccccctgcaatcacaaccatttattgcaacggctctcagccatctccaaactgcagccctcaccagtgacccagcagccgttgcactcacaaaggacgtgtctctcacagtacaaagtaatgcctggtactcacaaaaccaaagcaatcagccaagatgaaataaaagagagcagagctgcagacctggaggagcctgtccctgactctggactccacaaggagaacaggagacccccaaaaggggtgagtgggatctttttgtgtatttctcaaggaatttcagagtcacttaaaattccctctagatcccttcatgtgataccaaagatgccaaaaggaaggtaaagaagggaaaagaagaagtacatgggagaggaattccttttaaaaagaagtgagcagaggaaccaagcacctatttgttttaattcaaaatctaattttattttgtcaaaatttcaactcttattatagattcagggggtacatgtgcagggtagttacatgggtatattgtaccaagcaattaatttctaaaacggagtttcactcaaatccaaatatttttcaaaacaggaggcaaaagagaaaatccagaaagactgtatgtacatataattaaatattagcttttcatgaagccgacttctgaccatagagctctttgaaaaagaaaaataaaaccttccagatctcttataatcagattttagccaacacaaagaattgcgatttccactctttaaacttttttttaccaaaggtaatctcaccaatactaaataggtaaaaaagtcaaatgccacgcaaacattaaaccaaaggcgctggggccctgactgggaattgaacccaggccatggtggcgaaggcataaacttgaagctaggccacaatataaggcacctttcattgtgaatcccacagaatattgaaagcaggcagtatgaacttcaaaagatttttttggcagggggtcagattttttatctttaattttatcagaaggatttttaatgcaagccatgaaatcgttacatatctcctttgaaatttgattgtcccatgagtacaaataggtcaattgtttagaataaaggaatctaaaatctttttataaatttagagatttttctaatttaacagatccatcctttgaccactgcttagaatttgcgatgccatacttcttccagtagtgattcaatccaacacctacttcataaaaagccaaggatgtaattttttcagtttagtgtaagctttaccatttaagaagtaggtatttttgtaaagggcctgaaagaggcaatcccaaagatctcctcccctccaaaaattactcccagaattcggctaagatagcaaaagacccttgtttccacagctaaggatggagtttgtgtgcatgtggtgtctccagtaagacaaatctgtgggtcctccagtcacagacccgttactctgtggcgtgtcacttagaatccttgtgtgtctcaccctcagaaaattcagagcttatatctcctaatccagttttaccccaagcctttgttcctgggtgagccaatttggagattcaggaggtattatattgtagttggtaaatcaattgtgatgtggggtcctgtcgggttcgatatcacaagcagtatcagcatgtgaggaccagagctgtgaactcaacgctgtcaatcgacagcttttaggagtttctgtgaggactgggtggattcagggaccctgaaaaccatacttgtcacccttctagtcctgtgtgtctggaactagaaactctttggtaagcatgggttctctctcaggtccctggacatccctaaaaagagagagcatgtttacattgcaagtgaactggcatttcctttctctcctgcaaaatggtctcgtttgtcaacaggggatacatctctcttccttttgggaagtgggaggatgtaggttattcagtgctggtactttgatttagttcctacatttgatccctctacttggtgtgtaaggtagatgctattatcctcatgttagagatatggaaatgggctcagggtggatgagatattggttactttgggagaagtagcaaatgatagagccagtactgagccctggactatctccaaaaaccatgccaagagtttcgtctggggacctgagcctgatcatcttacttccatgaaatggggcctattttcaggcgataaacaactctacagaaaatgtgccattttaatgcaattccttttttcagtgttactctcctacctttacaactattatatgctcaaagttaagctaagtttcgtggaaaacagaaaacaaaatgcttcataattataagtcatgagatctacatagcatttaaaatttctctaaggcaaaacacatagatgaaattaaatggtgaaagtcaacctgtaaaaaagtgttttaaattttaaaaacatttgactatctttgaaacatctatctatctattacatctccttataatataaaaaacccagctgggcacggtggctcacacctgtaatcctagcactttgggaggccgaggcaggtagatcatgaggtcaggagatcgagaccaccctggctaacaggacgaaaccccatctctactaaaaatacaaaatattagccttgcttggtggcacatgcctgtagtcccagctactctggaggctgaggcaggagaatcactttaacccaggagatggaggctgcagtgagccgagatcatgccactgcactccagcctgggtgacagagcgaggctctgactcaaaaacaacaacaacaaaaaaaaaccttcaacatttatacaaacaaataaatgtctctagtataaaaattaacagaagctatgagaaggcagatcataaatgaagtgcaaatgctgaatgagcacaggcaaagattcttatcctcagtaatagataattaatcataaacttaaacgatgtattaaaatatatattctctgtttaaaaagtaaaagacaacatactgctttagtaagccttaattaaacaaactttcatggtaaaatttcattagagaatttgtgcaggctttggggaaaatcatgtattcattggtttggcatctctgtctttaaaaagccacttgagtgtcacactttaataggagatttgaatacattcctacctgtaattgataaatcaagcagtcaaatgaatcagtaaacatatagactatttgaacaatgtgagaagcttgatctaacagatttatgtattttactggaagttttttaaagcacacatggaaaacttaggaaattttgccatatattatgccaaatactacagctcagaaattactcatcgattgtatgcactgcacagaccatgttttgtggccactgtgctaaattagaagaataaaagtataaccagaaaatgtatctttagaaacaacatttcaaataaaacatcatggatttaaaaacaagtgataattaaaatttgagaatatgtcttaccaaaaatgaagactttatgtaaaagcacatagggtgtagctgaagtggtacttgtgggcaaatgtaaactgctaaaatgcttacagtagaaaagatttttaaaagaggtggtaattcatgagctacttacccatttttatagtaagaaaagagcaatgtttcaaacaggaaaagaaataaatataaaggcaaaaaataagaaaatagttaatatgtatgaaaaaagaatcaacaagtcaaaagatgttctttaaaaagcaaagttccagcaggattattaagaaaaagtgagagaagacgccagtactcataaataggaatgaaaatggcaacagttacagacaacagacaatgaaaggacactgagcacccttatgccaaatgcattaaacattagataaaatggatgaacacctagaaaactaaaggaaaccagaactgggtcaggcaggaaaagaggctggatgtgatgctgcatgcttgtagtcctagctactgggaaggctgaggcgggaggatctattgagatcggaagttagaggctgtagtgagccaggatcaggcctgtgaacaacgttgcatctcagcctggacaacagggcaatacagagagacttcctctcaaaaacaaaacaaaacaaaacaaaacaaaaagcatgagtagccctatcaaccaataatgaaactgaattggtatttttcatccttccaatacaggtaacaccaaagccagattattttacagagttctcccattattcaagaaacagttaattacagtcttacacatactctcccagaaaatggaaaaaaggaagcagatgcttagctcttttatcttttcctttttatttcttctttttttttcttttgagacagggtctcgctctgtcatccaggctggagtacagtggcacaatcatagttcgctgcagcctcaaattcctaggctcaagcaatcctcctgcctcaccctcccaagtacctaggactacaggtactcactgccatgcctggctaatttctatttttcatagagatgggggtctcactattttgcccagactggtcttgaactccaaacctcctgccccggcctccattagggctggtttcttagctcttattgtgaggctattataactttgacccccaaaccagaaaaaaatacagaaaggagaataacaggctaatctgagcatatacaaaaaatcctaaaagaaaatttagacacaagacagcagtaaataaaacagatattgttcagtgacaagtgggttttctcccaagaatacagttaaacagtagaaactcagttcaatgtaattcataactttggtgacttaaagaaagtaaatcatatgaatttttcaaatgatgtctccagaaaaagctttagctcaaattcagcctgaatttatgctaaaaactcagtaaaccagaaataaaagtgaattacctcaatctaaaaaagagcgtctacaaaatgctacagaaagcatgctttatacaatcagagagcaagacaagggtgttcaccatccccactttatgagaaaaaagaccccacaatatatagagggatattgccttgcagcaagacaaaaatataaaataaaaggtccaagaaataacaaagaagaaacaattataatttacagatgacattattgtctatatggaaaactcaaaagaatctgatatattgttagaatcaaaagattgttgaacaaggttatcagatataaaaatccatatatgagacacaatgacatttgttgaataacagcaaatgcaatttttaaaacaaactttttgagacagggacctcattatgttgcccaggctggtcttgaacttctggactcaagcaatccatctgcctcagcctcccaggtatcggggattacagtacaagccactgtacccaaaaagtgcaattaaaaaaaatttgtaatagcaagctaggaagaaagactttcacatgcaaggcctctatgtagaaaaacatgaaacctggttgaaagacaataaacaataactaacagaccataaagatataaataactaaacaggtgggggtgggggagagagagagagagtctgtgttcattaataggaagacttggtattatgaaaatactttccccaaattatgtatagaattatgaacttccaaataaaatccttgcagttgtcttttagctggacaagccaattctaaaattcatgtggtacaacaaagaaccctgaagaagagtaacaagggggcaattgcctactgcacatcaagttgtctcataaagctctgctatttaatatttaagacagcgtgctattggtatgctggtggcacagagtgaaaaatcaggaactatttctacacatgcatagaaactttataataaaggtagcattacagataaattggggaaagagaagcagtattcattcatgattcttgagaaattggtcagtctacacacaaagacccttggggatgtgtttgaattagatagaaaaagtactaatataaaagcaaaatatgatacattctattatattaaaagtaacatctacttaagaaagaacacaggccaggtgctgtggctcacgcctgtaatcccaacactttgggaggccaaagagggtggatcacctgaggtcaggagttcgagaccagcctgacaaacatggtgaaaccccatctgtactaaaaatacaaaaattagctgggtgtggtgacaggcacctgtaatcccagctacttgggaagctgaggcaggagaatcacttgaacccaggagacggaggttgcagtgagccgagatcggccagtgcacttcagcctaggtgacagagcaagactccatctcaaaaaaacaaaacaaaacaaagaaagaaagaaagaaaaaacactataaagaaagttttttttaagaaaaaaaaaagaagaagaagacacaaactgggaaagagatgtgcagcacatacagttgacaaagaatctgtgtccagaatatgtaaataacacaaagcacgaaggaaaagacacacgacacaatagaaaagctgaagatgtcacatcctaaaattgtgtctgcatacaacaggaaatatgtataaagaggtatgtccaccatggcagcatgtatacagcaaaaatacaaaaccaaaaaacaccccaagtggtcaccaaaaacatgagagaaataaaatgtggcatattaatgcaacaggagaatacctaataataaaaatgcaaaaactacagccagccacgcacatctacaggagtgaaatttgagaacataattttgaccgaaaaaaaaagcaagtatttgaaaattcagtatttcttttttctttttttttttggagacagagtctggcgctgtcgcccaggctggagtgcagtggcgcgatctcggcgcagtgcaagctccacctcccgggttcacgccgttctcctgcctcagcctcccaagtagctgggactacaggcgcccgccaccacgcccggctaattttttgtatttttagtagagatggggtttcactgtgttagccaggatggtctcgatctcctgacctcgtgatccgcctgcctccgcctcccgaagtgctgggattacaggtgtcagccactgcgcccagcctcagtatttcattttcaagaagtttaaaagcacataacgaaatatatggtttttcaggatgcagagtgtggttgaaaataataacagtaagagtattctaatattttgcatattggctactgagagtggggtggggaatggaattgggttgggatacacagcagagttggggatactggttctgttctttcttaaggtgggtgaagatagtcttgttgttttcactgttgctctccaaggggcaggacactgattgcagcagcccagccaggtcctatgcgaggccaccgctgtcctggccaccccgggacaggggccttggctactctcccacacctgtctgggctgttcctcggcgcttctgaaatcccatcccagccagggaaggaaccctggtggggtggagtggaggcgaggcactctgtaaccccatcggggtgtggagcagctctaggtcccaaaaggccactaggcatgcgcaaggtcgcacatgcagaagagagacccctgctcagaggccagagccggcatgaggcggtcagagaggatcccctagtggtggaggtggaaaattgcaaggacggaaaattccgcgtgaaaggcggactttgaacagatcccatccagggagctgctctgctgcagagaaaactcggacccagaagcagctcctctaggaacggattagcttcagggttgtcaccaacctgccttgagtgaagggcaagggggtggtcccttttccactggacgccatttccctggacaaggggctctcagcacaggacctaggcagtggctgggggctggcacagtggtggactctctatcccaggccagccgaggctccatggagctgccctaaggctcagcctgggcggattctgacttagaggcttcagtcatcatcccgcagatggcagcttcacccattggcccctcagccaagcacaggcaccaagtatctgaatctgcagggcctctggtactgggcaggatcgccatggcaacaacacatcatcaccagggtaaacctagcctgtctcacctggtctaaaccagctcaggttctctgagtgggtgagcaatcgtagaaattctgccttacaatgaaaaaaagaacccacagacagggatgaaaaatcgagggcattgtgaacgcttgctggccacaagccagctagccctgtggtaacatttctgacacctcctgcttaaaacccaaaaggtcagaaagatcctaaggccccgctttcaccttctgaattcctgccgcaaataaagaccaaggagtgagttatttattatttatttatttatttatttatttatttatttattattttgccctcctgctcctcgggaggcttctgtcctgagctcgccttagctaatcctgcgttaccgttcggcaggtgtgcgcctcaatctccccaccttaccgccagggaacttagcctgacgacactccgccccatcgggtcagggaaaaacggtaggagtagtggaatttcacatttcgccctctgcctgcatggccagtcaactccgcccctcgcggaaacagggggtgggcgcgggaccaactactgatcccctcccctgtctcttcacagcgctgcagtcaggctcagccgatgcttctttcctgcaggttccgccgagcccgtcccttggcggtggtgtcactggatgctgggaagagatggtgggaagagcctccatccattggcgcgtcactaattagacaaggaggccttgggctcccttgagagagtcacggtttctcctccgttgacccgcccttcattgaactcctttacttggatattcagagcgctggacagagatcacttggcgctaacaccctcggaggtcctcacggcgctccgtcggaatgacacagtcggattcccaagctgcgaagggtgagggagggactgcagcgcaggaactgaggaggagaggcccgcgcgcccactggagccgagcggtgaggaataaccggaccgacccccgacggtgcgtggtgagtctccccaacctgcaccattcgcgccccgaggcgccccaagcgcggctgggaggccagctgtggctgggacgattcactagaagggccggcctgcgtcgagtttccagggtggccgccagtgaccccggcggggcccatcccccttgccctcagagcccgccccgccccgctcccctgtggcaccgccaccgctactccaggaggcacagtggggaggagaagggggtggggagcctaaggagaggagtgaaggtgtcctggcctgccttggggaaggggcgggggcgggtgcctctgggacacccagcccgggggatcagccctgagagccagtccttaccctgaagttacagatctggcttccagatttctgtaacctaccttgttccaacacaggcctgaggctgttcctgttagagacctgttgcggatacgggtagggccctgcgggagatttacatctccagtcttcccccccgccccccgccccccttgtttttcacagacaggctagagcagcggcgctatcatagctcactgcagcctcgaactggtgaactggagggatcttcccaaccatcttttgtcttttttaagaagaaaaatacaaaagcttttatataggcttacacacagctacagagcaaatctttatcgtatatccaagattatcaaccacttgactgtacaaccaggaatcataacacatttgagaacaaccagtggcaaaataggaaaatgggccaatgaagaagataggtgactaataaataaaaatctgatatcaagtgtaggcaagttgtagggaaaatgggtgatgaacgaatagaacaaatgcctggggtaaacatcattcgaaagcccagaaagaagcttttagacatctttattgctttttgggggggcggggggggtggggttctggaggattgatggctgaactctcatgaaaagggtgcagtcagagaacaagaaagagttcccaggaattaaaattgtaaacagaaaagcaaattcagggtaattgctgaaagacccaccaaaggatctccaagatacaattgagaaaatcaaccctaacataaaggcaaaagacaaaggtgggttatttgagcgagaagtggtttgaggatttgcaaatatttgtttagtattgaatatgtgccaagcacacattacagaatacgttacttatgggaagtaacttagccttgaagtagctctgtgaggatgcatgtgtttcctttacctataattctataggaaaggcaatttttaaaaataaatcaaggttggatttcatcaattttacagaatacgcataactttataaaattttcaaaattctctaaaaacctattgagataattaaacaagcgtttttctcctttagtctgttaatgtggagaagtattttctgatgttgaaacatacttgcattcctgatataagccatacgtatgataacatattttgcttgtttgctattattaattctgaatttggttcactaagattttgtttgattttgcatgtatatttgtaagtgagattggtctataattttcttgtgtggttttggtatcatgctataacagcttctgaaaatgtgttagaaagtgttttcttgttaaagttttaaaccttctgagaattggttgaggaggagcttgaaaatttgttaaaattcaccataaaaatatcaggacctgaaattttgttattgttgtcagtaaataaaaattatcaactgtctttttaattgctttactgattattgctctattcataatatccattttttcatgagtcagttttggtaatttacatttatcgagatagttgtccgtttcatctaagttttaaaatatattggtacagctattgtggtattctctgaataattttaaaatctctcttgtgtcttcctgatttgtcctatttaaatttttttgattaatcaatttatattttcatattgttttctctctctctctctctcataatgttatggtttagataggaatggtccagggtggaatgacacaagtaaagaaacaataatgtggttttgtgtactataaggaaacatataaaagaaggcatgggaatacaaaggaatcaattaattgcacattaagtatttgttaaggtccaataatttgaaaaatattaagaaaagtgatactgtccttgctggacataggacattaaacagaccctgttaaacaatgttgagaacaaattaaggctatttaaggtagttcgatagcagtcaattataaaatgtgcatatcttgtgattgagcaaatgcacttctagatattactatatagaaatgtagaagtgtgccaagctaaacaaccatagatgttcattgcagccctgtttgaatggtcatagaaaatccgggatgagagtccaaagactcagcaaacaacaatttagcaattttgctactgcataaaagggtgcccccttttcaagcccacaacagagatgttgctactaatcctgaattcaacccagtttgttgcacattttaggatttcatcctgatgactaattttagggtcacctatatttggttaccacctctatttggttgcaaataaaaccgagcacaagttgactggcagaaaaagagactgtgctagctcatatcattgtaaagtcagccagaaatttggcttatggcaaagtttggtctaagactcaaacaatctcgctagatctcctgacagtagggaagatggtgggtcccagttttttttgttttgttaatcaatagtgaggattgggaatgtggagaagaaaggaggaagatgcagtaaaaaaaaaaaaaaaaatgctttggactttccagaccctgcatcattttgttttgggattggcttccttcttcctttttagtgcttcatgattcacccttcatcctacagacataggtgttgatgatggatcattgagggatgtgcttgacattttgggaacaagtggcctttgaggatgggactgtggatgtggcctctgtatcccagtcagataaaactatacagaaacataattttcttatatattttggatattatcttcttatcagatgtatatatttacaaatatatatgtatatatttacaaatatattctcctcccatttgtaggttgtctctttgctctgctggccttttttttctttgctgtataaaagctttttagtttgatgaaatcccgtttgtttatatttggttttgttgcttatgctgttgagattttatccaaaaactctttgcctagaccaatgtcatggattttccccctatattttcttctagtagtttcatagtttcagttcttacatttaagtctttatttaatacattttgagttaattttttgtgcatggtgagggatagggtctaggttcattcttctgcatatgaatatccaattccccagcaccacttattgaagaggctgtcctttccccattgtgtgcatgtggctccttggctgaaaatcagttagctagagatgcatgggtttatttctgggatttttattctgtttcattgatctatgtgcttgtttttatgccaggaccatgctgatttggttactatagctttgcagtatgctttgattgtcaggaagtgtaatgccactagctttgttctatttgtttaagattgctttggcaactcagggtgttttgtgcaggttttaggaatttttgtggtttctaattttaggatcttctacttcttcgaagaatatcattggtgttttgacagaaattgcattgaatctgtagaccactttgggtggtaaggacattttagcaatatcagttcttccaattcatgaacatggaatatcttctatttgtgcgtgtgtctttttcaatttatttcatcaatgttttacagttttcattataaaggtcttttacttccttggttaaatttacttcttttgtttcagctatcataaaagatagcttaaaaattttagcagtagatagctaagaataaattgtattctttttcagataattcattattggctattactggtattactggtggactattgcatagcatggttgattagagttaacaataatgtattccatatttctttttttttttttacttttattttttgagacagggtctcgctctgttacctacactgaagtatacagtggcacaatctcaactcactgccaactcagcctccccagctcaagcaatcctcccacctcagcctcctgagtgactgggactacaggtgtatgccaccatgcacagctaatttttgtctttttgtagagacaacaactcgctatattgtccagccagcatagtcttgaacccctgggctcaagcagtccacccataatggatgagaaagtgttgggattacagctgagatgggattgcggggggcgggttggggaaggtgaggttcagagagggcagggcctgcagggagaggggctgcagggagctagatactgccccccaaggaggagggagcactgttcccatcagagtgcacatctccttgcagcagctgcacaaatagagagccctggccaggctgatggagcctcccatgcctgctttgccccagggtgtggattctgaaatctgtgcccctaacgggtgggactgaggtccacagtgacatcccaggggaatctatgattccaaactccagccaccccgcctacaaaataggaaaacgctatgcttttcctattaaatcccaaattccatcagtgcaagctctcaccctctaaatcagaaagttcagtcattcctggcgtcctcccacacccccagcctgacttgcagacacacagggtggctgacacctgtccctgctcctccccctggcccagctgctgtgcatcctggaggtgatgaatgatcaggacaagggagcctagagcgggccccacagctgtcaggaagccaggactcagcctccaggcggcagtcaccctggtgccacagcgacagcgctgatggccattctgaagactgggggtgtcaggagagctgggcgtcccacagaactgcacagaataatggggaacgagggtgacacaggactcaggatttcagatgggtaggtaggctcagctgggagctcagggacagacctgaggagcctcagtgggaagtgctgaagtggaaagttctggaatgtttcaggaaaaaggctggaggcttagaggaaaggctgtcgctcctaatatggctggcaaccctggatgggctgtgttcctcccacctgcccatcctctcactgctgccacctctagggacacaacctctcttcatgtccaccttcccaaactcacctgcactcctccattatctgactttatgtgaaagcagtgctaagatccctctcctgcaatgcaagaaggagatgagaggcccgggtccccacagacaactcagcagtggggtcctgctgaagtgggaccgggcagaatcatgcactcccaacatcctggatcctgactgggggtaacagtgaagttcaaagaccatgccatcaaaatctccagagtgaggctcctccctggggtccctgaggtctgtccaggagctgctccctgagcaaatctagagcgtggagggctggggttgtggcagtaaaagcagccacatttgtctcagggtggaaagggagacggtgagctccagtaagggcaagggcgccatctagtgggcgcctcctgctaaggagcaaggagaccaggagagcggagatcagggctggccttggactaaggggtgagttcaggtggaggggactgaggtgtaaggaggcgggtgaagtggggaagtggtggggagacatgggaggagcaggtgaggggaagcttcagggaagctgcgggagggcacagcagggctctccactcctcagcattgacatttgggtggtcaaactggtggggctctgtgaactgcagggtgttcagcaccatccacccactcaatgccagcaggactccctcccccagctctgacaaccaacaatgtttccagactttgccaaatgtcccctagagggcaaaatttcccctggcagagtcactgatccacactaatctctaataacaattcaccagtaaaatccttcacttgggagaagaatcgcatgtgtgggaagagtagaaacttatatcttcaatatctgtcaaaatggctttcatttattccataatttgatgtaccaggagaaggcatgtttagagatgatgccatttggctgcctgtacctcacagcaggaatgacatgggctttccaaggatctatacaacaaaaaccagaatgacacacactgagttacactacaaagtgggacatgggggatcctgtagacattgaaagaagaaaatgcatgaccccaaggcaccagatagtccactctgatgctctcaccatcctagaaaacatctcagccatgaatgcagtcacatatgtcattaggaaggaatgtcttattaaggggaaaattgtagcaaaggaatttctgtttatgttcaaatttgtagacttttgtattattctttaaataagaatctactctcccccaaaatgaatgcaatcagtgtctggacagtgttggggtcttactcctggcccctgggagctgggagctgacagtgccctgctgccccagccctgggccttctctgaacctcaagaacactggatggcccccatttagggagtagagaggagaggtcttttaaacatcctcaccagtcacctctccacctttcagaccctgggcagaatctgttgcccactcttggatttgatctttaagttactgactttaaagcattttgacacttttttttttttttggtagtcagaagctttccacctccttgggaaaagtgattctctactctatgtacaggaataaccagtagaaatagagaaaaaatgcattaatattcagaaagaagatgatctctatgtgaacaaatgaaagcttaaaatcatcagagtcaacataaaatcaacattgccagtgctaaaactacaaaagtgacattaacggtgaactagaagaataaaacaagcattacagttgctggtaaacctaaatcacttatttttttaaaagaccattctggtatattgcaatgatgacaggagtgcccttcagtcaatatgatgcctgtaatttttgtgacctggcaagatatactgtcccttctccttttaaatctcaaatgcaaaatgagaggcaactcctgggtcaccccctcccagagcaaactgcctgcaagcagcccctggaagagcagaggccctagtttccctgatcctcaaggcaggagcgatgggaagctccctgtaagccgggggagagctttgttcccagaatgttcctcctcttcccagaggcaccaaccccgatgccctgacacttaccttctgctctctcgcccaatgttcactcaaatattgagtgcttggtgagtctgcagagctcaggaacttctgggagccaaatcaccaccagctcctccagaaaagatacctgtgcacacccaaaaccaccccactgagccctgcctggggtctgtaccacatccagcatgtgcactgtgagcatagaatccggccctgaattcatgaccacccaccaacatgcccccaactgaaaccagcaaattcccacacatggcaagcactgaggcttggaggtgctttctcacgaggtggttctgcttccaccatggggtggttgtcactgacactggaagttgctcagcacctgatagtggtgcaggactcagggaccctcaacatcaatctggtgaaggcagatggggcccctccagatcttctcccacctgcaggtgcccagctcagtaagaccccaaccctgggaggaggatccagacccctgtgccaggtagaccaagcttgaggcctcaggcaatgagagagaaggagatggaggtctgaccaggagctgctcttccttgagagcccgggtcccttccttgtgcaaaggcttggcttatgaacagaatcctcaatctgtagtgacagtgcctaagaggatgacatggactccggcctgatgtgcagccgtccctgtctaacccctccctgctgcaggacagcaccagcccaggagaggaatcctcagttggggagccagtaagaacatggaatactcggggcctcttaccttcctccagtccacagcagcagccaccgtttgtgcctaggacacccacctgctggcccttctgacccttacagtcaggccttccagatgccactcctgactcaaggcccagctactttcaccctgctgagccctgctcctcccaaccagggtcactgccttgctaagcacctcctccagctccagctgactggtcacccaacacccaaaccccagaggacaaacaagaaaataaacagatatgaagtctgaaggagatgcaggctatgaagacaaataaaagagtaagcatgaatataactccaccaacaaaattgtttcccaaaacaaaatcttctgtgcccatgatcatggaactaattgtccctcactatgtaggcaagcacttccagggtctctcaattatttcatgggtgtcaatatacactgtaacatagcaactcagaaaagaaagtgggaataatttatctacttagattaaggtcctaaaaaggtctccagactgccaaaaaaggagagctgaaccactcctgctttgagaaccattgaactacatcttttttaaaagtcaccccagaatggccaaaacaatctggaaaaaaaaattggaggactcacttcctaatttgaaaacttactaaaacactacaatcattaaaacagtgtgcttctggcacaagaatgcacatagagatcaatggaatagaatcaagagtccagaaataaaccctcaccattacagcccattggtttttgacatgggtgccaagattcctcaatggggaaagaatggtagcctcttcatattgtgctggaacaactggataaccacatgcgagatagtgtagttagacccctacctcacagcccatacaaaagttaactcaaaatgtttcaaaaacctaaatggaatagcaaaacttatcaaaccattagaagaacatataggagtaaaacttaatgatcttggattgggcaatggtttcttcaatatgacatcaagagcataagtaacaaaattaaaaatagataagtgaacttcatcaaagttaaaaatgtttgtgcttcaaagaacaccatgaagaaagtgagaagacacagaatatgagaaaaattttgcaaatcatgtaccccataagggacttgtatctaaaatatataaagaactattacaactgaataataaaaagataacccattttttttaaacagcaaatgatttgaataaatagttctctaaaaaatattaaaattgtcagcaaatacatgaaaaaatgctcaacttcatcagccaccagggaaatgaaaatcaaaactgcaatgagctatcacttcacacctactagaatggctataagttttaaaaaatattaaatagtaagtgtttacaagaatgtagagaaaatggaaccctcgtatattgctgatgggaatataaaatagcacagcaaactggaaaacagtttggctgtttctcaaaaacttaaacatagaactaccacatgaccccatatttatactcctatatgtacccccaaagaaatgaacacagaaacccaaacagatacttccaagtgtaagttcattgcagcggttttcacaatagcaaaaatgtggaaaccacccacatgtccattaagagatgaatgaattaaaattgaggtataaacatatattgggatattactcagccataaataggaaagaagctgtaatatatgctacgacgtggatgaatcttaaaagtgttaccctaagagaaataatccagaaaaaaataatacacgtatataattccttattatatgagacatgtaaactaggcaaattcacagagattgatagtatcagaggctaccagtgggtggggcagggggaagtggggagttattgattaaaagtatgaagtttccatttggtataatgaagattttctggtaaaaaattatggtgatggttgtacaacattgtgaatagaattagtatcatttaattctacacttaaaattgctaattcagtacatttatcttatgtattataccatatctaaagagatctttgggaaacaaacactcgccctgatcagatagtcctcatactcatgtacacacccttcctgaccttctgtaaaaagggatacaaagatttagggacatgagacagttcaggcaactgcagatccacaaaatatatgtatttgcaaagagaatgagagttaagctgggggcacagaccccagacacggagagggtccccctgaaaccttcaccaaggacagcagaacccagagcctcccacctccttccatcaaagtcctctcttcccaggacacacaggacacctccctccacacctaggagctggggatcctcccgagacctccaggcctgggtctctgtccctgggtcagaggccaggctggtgacactgaagatagcgggtgggtccttcccagccatcacccagtgagcccctttctagcccccagagccacctctgtcactttcctgctgggcatcattctgccttcctggagcactggagagcatgaggagacccagggcccagctggttttgtgtgtcacaaagggaaataatctaccggctgtgacagaaccaaggccagaacacagcagaggtcagtactggggagagtgggtcgtcctgttatgaggaccccatcagcgttgcttctcaaagttttgcctagggaaccaaatataggcaaaaaggaaggagaaaggagggacaagggaggcaggactgagaggggaggggacagagagacattgtaggcagagccccgcccttgcccataaacgggaagtgctcctgcctgagaggaagctcagcatagaggaaggaaggacagcagagacaacagtcacagtaaccctgtctagagcgttcctggagcccaagctcctctccacagaggaggacagagcaggcagcagagaccatggggcccccctcagcttgtccccacagagaatgcatcccctggcaggggctcttgctcacaggtgaggggaggactccctgggagtgggtgggaggagggagcacagagactggctggggtctcctggggaggatggggctctgagaggagacagagggcttttgttagagactcaggggagagagcgtctaaggagaaccaaaaaatctaagtgaactggaattgccaaggggcaaaacaatctcagttggtccatgttttcaagttcattgtcagtggccactacactttgaaaatgatagtaaaactatatcacagtgacaatttaaataaaaacaccaccagggcatgaaactctgtcttcatctgccaacctcagacattagcaaataaaccccaggatatggaaggccctgggaacgctcatgaactcatccacaggagtctgcagcctgtcccaggcactggggtgcaactaacatcactcaagtccatgccctcacagagctcacaatctcatgggggggaagacagacacccaaagagatctagaatgtgaggtcaggtgctgacaagagccctggagggaacagagctgggaaaggtcagaaagggaagacccagggtctctagaggaggcttcacgaaagaagtctcccagggattcccttgtgtgagtaggaactgaaggcagtggggagggaaccatgcagacccctgggaaagagggttcacacaaggaaatgccaaggtcagaggtactgaaggaatgagggtcatgctgctgactttgacccagtaggacacacacacacacacacaccctctaaggctgaggggtgaagagacctgcacccaggaccccgtctttccatgccaatgcataggtcaaatattgactgatattctctccctttcctagcctcacttttaactttctggaacgcacccaccactgcctggctctttattgcatcagcgccctttgaagttgctgaaggggagaatgttcatctctctgtggtttatctgcccgagaatctttacagctatggctggtacaaagggaaaacggtggagcccaaccagctaatcgcagcatatgtaatagacactcacgttaggactccagggcctgcatacagcggtcgagagacaatatcacccagtggagatctgcatttccagaacgtcaccctagaggacacgggatactacaacctacaagtcacatacagaaattctcagattgaacaggcatctcaccatctccgtgtatacggtgagtgattcctccgtgcctctgggtgttgggggtcagttctgcttcacatacgcaggattgtcaggcctgggctgtgcctgcatccccctctgcattacgtcccatgttggggtttgggcatttagtgcaggacacacccaggggagacaaactataacagatcagaattcctttcccttatccggactccgtggaaattccctacagcaagaaggatagtctgatgcgggagatgcagcgggggaaaatcagtctcagtccaaccccccttggcctcctcctcatagacatgacctgagaaagatcttataggactcagtcagggcctggcctgaggatcctctgagagaagctcagcccttgaagcccctgccccaggcccctgtcccaagatcctgactccagatgaccctggggagcctgtgccagggctgggttgtggcttcctgggcagggctgattgtgagcaaggatttaccagctgtcccagggccgtggttcctagagctggtcaccaggcagggctcagcccccagagccccatctgggcaagggcagagcctcatctttcacctgagagtcagagtggagaggacagacaaacaaacttcccaggccattaaactggatgggaaacttaaaagatgtcccgggaagtgcactgtcctcaggaggagggaaagcagagaaaagacactctggaccgctccttctccaccaggaatcaggcccagagaactctttttttttttttttggagtaaaataataatagatgatgtttatttggagctattctgtgccaagctttaggtcaggtaattgtaaatattttaatgttaatttacagagaggatggcaagccagggaccattgacatgtaccccattttattaaagagaaattgcatcagcatcacacaggctgtcagtgctcaacgtcacaccaccgtgtgtctgcagcccagaatctggtcgtggccaccaccgtggggcatctgtggaccccaggaccagatgttggttcagctcctttcttcttgggcatcctcagctcagagagggagattctggtctgaggaatgacgggcaaatggagaattagtcagtttttacttagaacgaaatcacctgtctcaactatcagactcaatgccaggattgtccaagcctctcccatcagatccacattccttccctcactggacgtgaaatcatgaatttcttgatttgttgatgtcactcccatgggaggatgaaggaaaggactcagctttctcttcccactacaccctgtacctgcacaaggcccaactgagacacacactcagtagttctctgatgaaggagggagggaattaatgaaaaaagaaaggaataatcataacctctttacagactgggtcctggatgtaggatcctaggaggagctggccacacctcttccttgtcccttaggggctgagacccatgttccatttctctgactgcctgctcctaaagccaccccaggtattgcatctcatgtgactctggggccgctcatctgtgggagggttttcagggctccctggtcctggtctgaggcagctgggtcctcctggtccctggggtctctgaggtcactgtagtccctactgctcgctgctatgggtgtctctggttctctctgctcctccctgtccttcatctttctcctttattcacaggagaatgttctaaatttgactctgagatctctgaggatgcagcatggccccaagacactttctgttggtcactctatccacagagtcagtggctcagccctccatccaagccagcagcaccacagtcacagagaagggctccgtggtcctgacctgccacacaaataacactggaacctctttccagtggattttcaacaaccagcgtctgcaggtcacgaagaggatgaagctgtcctggtttaaccatgtgctcaccatagaccccatcaggcaggaggacgctggggagtatcagtgtgaggtctccaacccagtcagctccaacaggagcgaccccctcaagctgactgtaaaatgtgagtgaccctcggcccctctcactcctttccttgtatattttcctaggagggagggggggtgtaaaatgatacacggaatgagaaggatgagattccttcagagcctggggagcaatgtgggtaagaactcagggattagactcatccagttatcatcctggttacaataggtaccaggtatttgaccttgggcaagacactcaacctcctgggcctcagtttcctcatctgtagaattgttacaaacacctggacctcagggtggttgtgaggatatttattcagagattaatgcgattaaagcccttaacaaggtcatgcacagagccagggctcaatcagtgctatcaatatcgactggtattatttttatgaactttgttgttattagctgttaagttgagcagactttggttacatttttgttgtatcactttcacttaccagttctgtaatcttaattgaagtactgaatcttaattgaagtactgaatcttaattgaagtactgaattgaagtacttcaatcttaattgaagtactgaaactataagtttcagattctaaattggcagatgggattccaccctgtttggaaaaactcaaactgtgtttttcctctgctctcactccacaataacaatcatcaacacagacacacttctgtgaccaaatgtgatgggggggggtttctcccacacacccagcagccaatcagttctgcaccgtacatcagctaggtgtcctccaattccatcctgacactatctacctggacatatcagcagagggctcagtcccacaaaattgccaccaccttcccaccagtcacaagtctgggcctccagagcttcttatgactggcttcacattgaggtttccatgactccctgtttgggttggattagtttgctcaaacagctctcaggactcagggaaacacatacttaggcttaccggtttgtaataaaggactttacaaaggatgcagatgaagagatgcacagagcatggcatgtgggaaggggtgtggagcttccatgccctccccagatgcaccacactccagaaacttccatgggttcagctcttcaaacccagtccttttggggttcatgacatagatatgattgatttaatcattggccattaattgattcaatcattggccattaattgattcattggtcattggtgattaattcaaactccaggtccctccccagggattaggggtgaggctgaaagtcccaaccctctaatcctacctgggtcagtgaccagcctcattctgaagttgcctaggggctgccagtcatcagtcaattattagcttgaaaaagacatcactttgaagattctaaggactttagagtcacataccagaaaatgggtgtattagtctgttgggagcaagccccccaaaatctggccataaactggccccaaaactggtcataaacaaaatctctgcagcactgtaacatgttcataatggccctaatgcccaagctggaaggttatgggtttacaggaatgagggcaaggaatacctgtcccacccagggtggaaaaccgcttaaaggcgttcttaagccacaaacaatagcatgagcaatctgcatcttaagggcgtgttcctgttgcagttaactagcccaacctattcctttaattcggcccatcccttggtttcccataagggatacttttagttaatttaatatctatagaaacaatgctaatgactggtttgctgttattaaatatgtgggtaaatctctgtttggggctctcagctctgaagcctgtgagaaccctgatttcccacttcacacctctatatttctatgtgtgtctttaattcctctagcactgctgggttaggatctccgcgaccgagctggtcttggctgctgataaagacatacctgagactgggtaatttttttaaaaatgaggtttaattgacttacagttccacatagctggggaggccttgaaatcatggcagaaggcaaaaggcatgtcttacatggcggcaggcaagagggcatgtgtagaggaactcccctttctaaaaccatcagatcttgtgagacttattcactatcatgagaacagcatgggaagaatccacccccatgattcaattacctcccactgggtccttcccccaacacgtggggattattaaaattcaaggtgatatttgggtgaagaagagccaaaccatgtcattccacccgacccctcccaaatctcatgtcctcacatttcaaaactaatcatgccttccaacagttccccaaagtcttaactcattccagcattaacccaaaagtccaagtccaaagtttcatctgagacaaggcaagtcccttccacctataagcctgtaaaatcaaaagcaagcttagttacttcctagatataatgggtgtacaggcactgggtaaatacaaccattccaaatgggagaaactggccaaaacaaaggggctacaggccccatgcaagcccaaaatccagcagggcagccaaatcttaatgctctgaaatgatctcctttgtatccatgtctcacatccaggtcacactgatgcaagagctgaactcccatagccttgggctccacccctgtggctttgcagggtacagccccactcctggctgctttcataggctggcgttgagtgtctgcagcttttctaggtgcatggtgcaagctgttagtggatctaccattctggggtctggaggattgtggtcttcttctcacagctccattaggcagtgccccagtagggactctgtgtcggggttccaaccccacatttcccttcaacacttccctagcagaggttctccatgagggctctgcttctgcagcaaacttccacctggacatccaagcattttcatacatcctctgaaatctaggcgaaggttcccaaacctcaatccttgacttctgtgcacctgcaggctcaacaccacatggaagctgccaaggtttggggcttgcaccctctgaagccatggccccagctgtaccttggccctctttagccatggctggagtggctgggatgcagggcaccaagtctctaggccgcacacagcaggggagccctgggcctggcccaggaaacattttttcctcctaggcctccagtcctgtgatggaaggggcttccaggaaggtctctgacatgccctggagacatttttgccattgtcttggggattaacattttgctcttcattgtttatgcacatttctgcagctggcttgaatttctcctcagaaaatggatttttcttttctattgcatcatcaggctgcaaattttccaaacttttatgctctgcttcccttttaaacataagttccaattccaaaccatacctttgtaaatacataaaactgagtgtttttaacagtacccaagtcacatcttgaacactttgctgcttagaattttttttccaccagttgccctaaatcatttccctcaagttcaaagttctgcagatctctagggcaggggcaaaataccaccaatctcttttctagagtataacaagagtcacctttgttccagttcccaagaagttcctcatctctgtctgagaccacctcagcttggactttattgtccatatcactatcagcgttttaatcaaaaccattcaacaagtctctaggaagtttcaaacttttttcctgtgtcttcttctgagccctccaaactgttccaacctctgcctgttacccagttccaaagtcacttccacattttcaggtatctttatagcagcactccactagctggtaccaatttactgtattagtccattctcacactgctaatgaagacatacctgagacttggtaatgtatgaagaaagaggtttaattgattcacaattccacatggctggagaggtctcacaatcatgatggaaggtgaaaggcatgtcttacatggcagcaggcaagaggacatgtgtagggaagcttccctttatgaaaccatctgatctcctgagacttattcactatcacaagaacaggatggaaaaaacccaccctcatgattcaattacctcccacaaggtccctcccataacacatggggattattacaattcaaggtgagatttgggtggggatacagagcctaaccatatcaatggtgatgaacaccaaatacgtatttcacaatatcacatacccttctccctcaaggcaatgggagggtgagaaaagctgcaggtagattgattcccactgtgccttccatgtggaaggcccctgaaaacagtcaatgaacatcatccctgctcatcagcattgagttggcagcaagggcctgccctttacgactgccatgggatggaaaaaaagaaacagggggaagaggagtgatgtgagaggaaggagggactaaaaaacacaggagcaggatgaggtgcaggcttcctgtgggagaatgtaggagttgatgcatcccagtaattcaagcctaagacacagaaaatggtgcaaccacggagagcaagggagccagctatgaggacagcacaacagaccacactcaggctccatggcatttccttcctccctgaccatgcccctgccctgcaaggcccctcatggttccccctggaacagatttggacctcatcccctttgccttcttctttcagcagatgacaacactctaggcatcctgatcggggtcctggttgggagtcttctggtggctgcacttgtgtgtttcctgctcctccgaaaaactggcaggtaccacagcttttccccattctgctcccatccttcacgctgaccccaggcgagaaggaaggagaccctgtcttgtattcagtgccaggctctccccagcctcccgactccccagggatccttccctctcattccatggcaccttcctcaccagctgctgaccctgggctgcttcctcaacagctttgtcctcagtgaattcagtccaattaaggccatgcccctgagcatggtcctagtttcctagcacagcaaagccacagctgcctggagcaggggggagcggtgctcaatacctggtacctccccctgttcactgaatccatccacccagtgagagggcatctgaggggggatcctgggcatcatcacatagtggagactggaacagcctggacgggctgggtggggtcagcacccctttgactgacatggtaactgcagacactgagctgtgagaagggagaaccggggccccaatatggcatatcctggaatgtcgtttatgtctcttgccaaagggcagagacagaagacaagatcattgtcccatttcagcatctccagccctgagtggagtgtctggtcacagcagggacactgagttccaggagaatccaagatgcatgcagtcccctcagtgtcctgcacatgtgcctggccctgctttccccctggtgccttgacccttcctctcaggcaacccctggtggtctgattccttccctgggtcctcagtccctttcctgtgtcactggatcaatgttctcctggcccagcatctgcctgagagtccttcccctctggccaggacagatgtggctttgtaaggcctttcctcaactcccctcacctgggcccctcctaccacagaactccataaagaaaggaggtctccatacccctcttggaaataggctcctttcctggtcccctattttaactccaatttgtgacttttaaccttgcaccttcacaaataaccctgacctttcctagggccagcgatcagagtgacttcagggagcagcagcccccagcctccacccccggtgagtgtcccttcagtctgggtgtggctgggaactactaagccagccccaagttgtccactcctgccagttacacccaggggcctctgaccctatccctggggctgcaaagaggatcccataaaacatcacacaggaaaccccaactggccgggtcagccctaacctccgggctctgggtcatgggtcacttcctcaacctcacttgcttacttgacccctaaaataacctgagaaaggctccctctccccaattctctaagaactgaggacccccacacactcttgcaggaggggcccagctatcctaacactctcgtgctcacttttgtctctgtccccaggccatggaccctctgacagctccatctcctaggtaagactgtccgttcccaatcccatttccactggggccccagctgtgcaggctcagggcagggggactgtcaatccccagcacaaacccaccctacccagaatgacttggataaggttagacctgccctggccatgagctgggcctctgttcagggccaggatcatccactccctgtgctaaccccaccctgggaccctccatcacctgaggagagccctggaattcctacacagcaggaatccttccctgtcccctgacacccctctctcccctgcccagattcccctacccagcaccagggcagctgctctcatctatgaggtgagtgggggccacagatattctggtcccttgggccccagggagacccaggatctgtccccactggcatctggctgagctgaagttcaggaaactgcagtgaaaataacaggaggtggtgagcagaggagggaggggcctgggagcaggaaccccctgagcacagccaggttcagtcccagagtagccctgggtgggcccagagagagatgccagaccctgttctgagaaggcctcaggggtcaagacctcttctctgtttttacaggaattgctacactctgacacaaacatttactgctggatcgaccacaaagcagatgtggcttcttaggttcctctgggagctgctcctgtgggttgatggagcgtccctgaagcccccagccctggggatggggaaggacatggagcctgagccagagaaccagctctgagtcctgaggagacacaggcctggggacaggaagggatgggggtccctgctgaatatatagagacctcaacagactgccccgggctctgggtgggccaaggcgaaggcttcccatcaccacaggaagtgggggcttgcagggaaagtgaatgggcctatggcccacccggggtcacctggaaaggatctgaataaaggggaaacttcctctcattggctctttttctgctcatgggaacttagcagaaactcacctgaaactccatgtccattctctcctgggtcacacaggaaaaatatctccaccttatctcaaccccagtctctcttccctggaaagacaggagtagggggttaggagtcaggctggggtggaccctacacaggaaagggcaggattcgcaggagtcctgcccagccagctgagtgctcagctgtcctcacactaccctagagaccaaggccatgcacagccccagcctgggtccctctgtgaatgcatgagatgtctcaggagtgcaaaagttggggccatctgatgtccacacaaaggtgagcaatgcaggagcatccatgggtggtacagatcgtgggtgtgacctccacacagcctccagtgtcctgagccctcctgctctcttcacccaggccctggaggccgtatctatcactgtcccccagcaatgagcttgcctgtccccaaatccaggatcctggatgcttagctctggccaccaggttctcctctgtcccaatggccactgctcaggagatctttatccccgtgggacacagagaggggttgtcagagtaaccaaggtgggaacagaccaagaattcagtccttgagcaaggtcctcccaggcactacccaggactctagcccctcatttcccatcagttcccaatttaccccctggcgtggatctcactgagcaagcctcctctccacacaggagcgtccaggtcagaggagcagggttccccaacctaaagctcgtgcaggctcccatggcgatgggacaacctgtctgcccctctacctggacccacaggcccctccagccctgcctcacctgcagctcctccacacacctgggccagctgttctcagcccttccctgagggccctggggagagtaacgatctcatgtaggttcacttggaccaggtgctaccttcccacaaacaagccggtccctccactaaagcacagagccgtggtttccaagggtgttctgccattgtccagggttgttggccatgagataggaagtaggaaaagcaacctgcaatatttacatcaggatttagctgtaaatgaccctggatcccacctgcacacaaggtgactcctctgtaggttcctgttgaggctgtgacaaattcccacaagctaagtgacacagaaacttgaaccaaggtgcccacatggctgcgttctttctggaggctccagggcagagtgcgtttcctctccttttccacctcctagaggcctcctgcatccttggctgtgtcctctttctccatcttcaaagccagcagtgcagcatcttgacaccgctctgtcttctgcatctatccccacatctcctcctccttctctgactctcccacctccctctctcatttgtaaggaagggattctgtgattatgttggacccatctggataaactacaataatcttccaaactcataatccttcatttaatctgtaaggtctcttaccatgtgacagattcacagatgctgggggtgatgatgtgacatttttgaaaagcccctgttctgtccatcacccctttcaagaccattttctcatccttgctcactacaaactgcacatgggctcctggacaaggccatcctgactgtggtgtcagtttctgcaataatgtctacagcagcttcagggttatgggagagcaagacagaagtcacttcaagatcctgaacacctctccaccttctcattgttaatgatgctctgttgttaaaagtgaaaggagagcagaggtaactagaagattctacatcacactctgttccatagctcttggtcgtcagcaccacggacagtgtctcaggaatgttcattctgaggtgctgcagcaggaaggtggcagatgagaacagactgctggaaagatgtccatgtctagtttacaagaaaaagacacaaccaggaacaacgttattgcagggaaacttgatctgctctattttatatatcgcaaaatttttgcatgcatctggatgttggggttcttggcacatctattgccataccctgcagagctgagtgctgcacccagggtgtggtctctgggaggctgagagcctgctttggccacatggtaagtctccctgaccctgacaatcaggccattttctctgcctacagaaggtgggaacttttcatggttaatttttgacccccgtgcctgaccctggaaccacacacatcacgctgcctggagcatgccctgagcacagcatcctgctcctccagccccagctgagcccctgagaagctgagctgaccaagcccatgggcttctgtaccagatcctccaagccaagccttgtcacccccatcttgctaattcctgcccacgtcacacccacagagaagactctggtcctacagaccagcgctgcccttacagagactcaggtccagcctatccagtgtccctgctgggcacacacagcactcaggatgcccaatttaagggtcatctgtgggctcgggggtggggaggtcctgtaacttgcatgggtcagagccctcctcacatcctacatttcagcagtcaccagggtcctctctgccctgtcctcaccttcaatgtctcaatgactcactcaatgtcctgggtcatccttgtcatctctcctggacatagccacagctcctgacaggaggggttgaggctctgtctctccatcagtccctcccactctgaccacatgaacctggtcagccccatctgagcctcatcccctcaccaggggccctgtgctctggatccctggatacctgggtccttgtcatgcaaacttgacaacagtaataaccaccaggccctggcatcctcacgcaaagcacatgtctaatgagagacaactggctccacacaccttgaggcttcactgctcaggggcatcctcatccctctcctcccacccctagagatggtaagcaccaccagccccttcccccagaccacagcctcagatctattctgaccctctatacagagaggctctagggaacagcaggcactatgaaatcccaccgacccaggtgccacccgcggcctcacccctcctcatatctatgatggggacagacacacataacacacctctgctcactgcccagtccccaaggtcaatcgcagtctgcttctcccctagatccactgctccccatgtcttccctccccagctgcagcctgggtggactccctgcttttctcagtccatgaaggcaggttccaacctttgtgttgttgcctgcaatgccctcccttctcttcccttccctatgagcgcacacctgcccatccccctaccttctggccaaagtcatcagccacctgctcccctcagtcttccccaaccctgcccatggaggtgacggttcctcctagaacacccaccactcactcttggctttgggtggtaatcacaggttctgcaggggtcacctgtgctcaggtgtgtcacctgtggaaccaaaacttctgagcagagggagctgctcaggacatcttaggggccctgacctctggtctaccacaggaactcaatgcgatcttggtgggactgtggtttagtccctatagcaaccttgacctcatcatgtttaatgtgcacatgctccgaccagtatcccacttctaagagcctccctgagctgtgagctctgtgaaggcaagactgtgcctgtcctctctctgctgaagacagtgaccagcccacagcctggcacaggatgcttcataaacatgcgttgactgaatgagctcctggatcaatactccacatggggaaaagacatgtgtatgaaacactgcagaatgtctcgtcattatgaaaactgggaaacagcccagtaacttaaaaaaaagattgagatgaaggtcacagaaaataccatatgtttaggaaacaaataatagcaattcgggtccactgaatcagggcagccctgactagtgttctgtaagacaagcacaggagagggttttctttacaggtaatttccacaaaaagttgttttcagaagcagctcattggctgagaaggaatcctaaatcacaagtccattccattctatgtgcttagttaattttagggttctcctagttgagatgttgaaggctggtgaatactgacttcagctgtttatccaaatctattggaacattctgtggtttgagctcttgctggtgaaagtgcaattgtcttgcaatctcctgactccactttagaaagctttagcctttgttacttcattttctgtcacaagattccaacccaggaacaggggtgtggacaaagcattgagtgtagccatgcaatgagaaaaaggggagccaataacaaacacaagataaaatccatatgtattgatataagaggtgcccaccacacatgattcagtagaacagaatggtctgggcaggtgtggtggctcatgcctgtaatcccagcattttgggaggccaaggagggtggatcatgaggtcaggagttcgagaccagcctgaccaacatggtgaaaccctgtctttactaaaaatacaaaaattagccaggtgtggtggtgtgcacctgtaatcccagaaactcaggaggctgaggcaggagaatcacttgaacccaggaggcagaggttgcagtgagccgagatcacaccattgcactccagcctgggcaacagagcaagaatccatctcaaaaaaaaaaaaaaaaaaaagaatggtcttcagcaataatataattcaatgggtattttggcgtaaaacgacaagtgagataaacagagtattattaaagagagattcacaccaactgcaaacagtggtaacatcctggaaatttaattggggaaggggtggggtcaaggataagacaccttattttacgcatgattagattcctgggatttacaataaatatgatgacttacatcatttttaaagtaacagaagaaaccatttgaaaagactcaggaggtgtgtaaggtcctttgggtctagagcccaggcctccctctatcccccacacttctgcgtctctatcccccacactctgagatggccctttgaagtctccccatctcacccctcagagacagaggcatggagatccctagggggagggaccttgctgcagctcccaaagctgggggcagggggcagagtgaggttctgtccagcccaacatgcactgagtgggcacctactgtgcgctccttctggccagtgggatggtccctggcctgcagagtttcaccactcagtggatgctgggaatgggacaaaaaagaccaaaccaccctgtaggtccagggatggctggcctccctcagcagggcccacagccccccatggttcaccctcaccaaggtcacctcaacccacctcctcctcaccctccaagctctgcacacgaactctgtcacctcttccctgcagccaggtggccgcccacctgaggccactccctctgcaggcagctcctgcccccacaccccctccttcccagggctcagtcaaaagggcatctcccaaggcacagcaactcagcccgtcacaggctctggtgtccccagtgctgtcccctcacagcccttctctcattatcattaactcctcaatcgcatgaagttcactgagtgcctgtttccctgtcacatgaggtcaggagttctatacaagcctggacaatatggtgaaatcccgtttctactaaaaatacaaaaattagctgggtgtggtggcatgcacctgtagtcccaggtactcaggaggctgaggcagaagaattgcttgaacccaggaggcagaggttagtgagccgagatcgtgccactacactccagcctgggcaacagagcgagactccacctcaaaaaaaaaaaatccaattccaaacactaataaaaaatatggactttggcatgaacccatggtaggggaatggggagaccaaaaatcccctgactgggaaagtgataggctagtacactgctgtccaataaaaagaaaacccaggacaccctcactgttttgtgttgatcttttttcttaggtctcatcataaccgttttatgaatgtgggagctccaaagttaggtgcatatatatttaggattgtaatatcttcttgtttgattgatccttttatcattatatagttgccttatttgtctttttcttactgttgttgcttaaagtctgttttatatgatataaggatagctattccttctcacttatggtttccatttgcatggaatatcttttatcatctctttaccttgagtctataagaatccttacatgttaagtgagtctcttgaagacagctgatatttggtttgtgattttttatttatcttgccaatctgtgtcttttaagtggagtgttaggtcatttacattcaatgttaatatttgttccagtcatcatgttgatcgttatctactttgttttcttattgtgttattgttttataggccatttgaattttttggtttcaagaggttctattctgttctatttaaatcttttgttttgtgatttagaagtccctttaacattccatgtaggatggtctagccgtgacaaatcctgaagcatttgcttgcctgaaaaagactgtatttctctctttcattttgaaatataatttcactctacacaagattcttggctgagagctattctgtttaagaagccaaaagattaggaccccaataccttctggtttgtaaggtttctgatgagaaatctggtgttagactgataggttttcctttataagttaattgatgcttttgtctcactgctcttagaattcttgccttcacattgactttagataacctatgactatatgacttggttatatcctttttggcagtgaatctcctggatcacttgagcccaggagttcaagaccagccctgggtaagatggcaaaaccccatctctactaaaaatacaaaaaattagcctggcctggtggcacacgcctttagtcctagctacttggaaggctaatgtgggagaatcatctgagcccaggaagttgaggctgcagtgagccatgactgtgccacttcactccagcatgggtgatgagagtaagagcctgtctcaaaaaaaaactagctagcattttagaaaatttttcatttatattctgattgttttttacatttctttatgttggttttcacccttctcttgtatctctttgagtagcttaataatcaaaccttgtaggcatgcattattcttttaattcttttttcttttgtctctctgactctgagttttcatatattatctcttcaagctcacaaattctttcttctgcttgatcaattctgctgttgaaagatttagtgcattcttcggtttgtcaattgaatttttcagctacagaatttctgcctgatttttaaaaattatttcagtctattaaatttatctgataggattctgaattccttctctgtgttaccttgaatttcactgaacctcttcaaatagctatttttatatgctagttttgaagagggtctcagggatgagagtgggtttgtgtgttattttatttacccctctcaaccgccatctaagtttatttcagaggaggatgcttatcctcagaaagatgaatcaacttgccaatgttggtggtggatctgggattagaagttacatgagtctaacatcagaggccatgccatcatcactaccactgagagagaagtgaacacagtttgttagggagcaggaaggagcaaggagggctatggcagcaagagacaattttaaaacagggaagttaggtaaggttactaaagagataccatatgttataaagccatgaacactagacagagatattcgaacttgatcttgtgattacaaaagagccactgaagattttaagtaagggcaaaactattcgaagtcacagcatgagccaagaccaaagagggtagtgaaattggggctctggattcctaaactaaagagatgctgccacaactgtcgttcacaacagtgaacaaaccgtgtgatgtgtggagtgagaactggacaaaggctgaagccctgggtttaaatgcaagaagtcaggcacttagggaatggctttgttaggcaagctgtatatgctctctctggaccttggtttgttttcatccataaattagatgcagtgagaattaacctctaaatgatcttcgagccttgctactcaaagtgtggtccgccaaccagcagcaatggcatcatccaaaagctccttagacatgcacaatctcaggcctcaccagaaaaatcagaatctgtattgaataaaaagatctgtgtgggatctgtgaacacattaaggtttgcgaaacacttctctccattgtcttccatttctaaaaggcaattattccatgctcacctccactctgttacttcacaggagaaacaagaaaaaaaaaattatctgttcacctcattagtgcccttttcttagtcatgacatcctcttagactggctcagttccaggaagaggttttagaaaataccagagaggcagtgctgccaccctgtgaccatcgtcagtaaatgcgcttaactctgaccagtgtcaacagcaaaggagagggactgcagatggaggtgaagtccaagtcgcagactagatgagagaatcacagccacccacaattacttaaacagagggacctcaacctgcatcatagagcaatgtcctattgcaaaggacagtttttataatacttaatatgtggtattagtaagaaacctggttccaagccaagctctgcccttgtaaccataaaagtgaccctgacaggtattttcagacacccagccctggcctgaactctgccagtaaacatgtaatttcccaaaagaccttatgttactgtgacagttcttttccatcctgagccaaaatatacctgatacacactcaccaatccctgtcctactccccataagctgaaataagcctaacaccttttcatacaacctaccttcaaatattggttaaaaaaaaccatgtgccgcccaccccaccttcccttggccatttcccacatggggtcacctgaagccccacaccctctgatcactttcccatggggaagcaaagtgcagcaaccacagcaggcactgtgaaacctaggggtgtcccccagggcagcagagccacaggacccccatccccatcctggcacctcacccctatctagaatccgaacaccacatcagctgatctggggacgctgacttttcctgcttctgctgctgctcagtcatcccacacctgtgcagatgtctactttttattccattttattttgtaagaaatatttatcagagcctgctgtgtactgtcactggagagacaaagatgaatcacacctggtccctgcctcgcagaactccaggctgtagagggaacacactcaaagccagactattaccgttcagtgagaaacaccgtgacagacatcagcacagggttttctgatgcatgttaccagtgctttgtgaaaaatcttccactcttggttttctgcacttagttttcctcatttcaagctctaagtgaaaaagagaatacaaatatccccaatggtcctttgtgcggtcacagctggacccggcatgtcctcttggctaatccagggtgttcagggctcccacttcactctgagtgtcctctctcctattggagctcaccattgtcagcacctgcagcagaaaatctagcaagtcaggaaacttgctttactcctgtaactttaaggctagtgaccttgtgacagtgaactaatcctataaatccttttcactttaatttccacatctgtaaagtggggcaggtggattcagtcaccctagagacagcagcacacctgatcttctcagcatccaccatctagcaaatatcaggcacacattaggcactcaaagcctcactgaatgtatgtgtgaataaatgactataatagagccatgtggatcgtggacactatcaacacatatctttgaatgtctatgaagtacacttgagaatggggaaagcaaataattgaggcaggacagtgttttcttcttccttccccttacctccttcctgaagagagcctttgtacctcggagagactctgttgccaggtttctctactgtaagttactatttgtcccattataatcaataagtatctcctgaagtgatactttgggaatatggaagtagcctgtttcttctcaacatacttttttttcccccttggtactcactagttgtagcatcatcatacttttacccattcatatttaaagtccattgataattcttgcctacaaacaattgactgtgctgttagccaaatagtgattttctatttgatcattccttctacattcattaattggaatcctgctgtaagaaaaagctgtttcttcatccttatatatttatgtattcaattatttatttatattagtaggaactcatgggtatttatgggttggaatttattactatcattatttcttatagtgctcattttgtctcaaaattggtcattcaaagctccttctggttggcatctgtgacctttcgacagatctccattatttttcagccggctccttactttctggcctcacgagatgctccaggctccgcttgtgctttccggccccagccctggaatcagttatttctcccaggaagccctggttcctttcatgggagaatgatgtttacgaccacgagcactactacacccattgctgtaatagtaagtgccggtgccttcacgccctctagtggtcagtcctgggaaatacacactcacacttgtgtactgttacccatattctacaaattaggtaaatgaggcacagaaaagttaggcgacttgaccaacatcacgagaaaataggtagtgaaactgcgagacagatacacaagtcctaataagtggaagtagcttcttcacacatgcacatcagcagaaagccacaagcccaatattccagcgtagacactctcttgggaaaaaatccagaattccaaagtattaaccctaatgacaaccatcatgtactgactacctgcctgggcactgggctcccacagtaacacatttattcctaaatatatgtaaatatataaaactaataactttatcttaaataaatatccattttatatattattatataaaatttattatagaaaactttatataattatataaaatatataggccaggcatggtggctcatgcctgtaatcccagcactttgggaggccgaggcagcatatcacctgaagtcaggtgtttgagaccagcctggccaacatggcgaaaccccatctctactaaaaaagtacaaaaattagctgggcgtggcggcaggcgcctgtaatcccagctactcgggaggctgaggtaggagaatcgtttgaacccagaaggcggaggctgcagtgagctgagatcgtgccactgcactccagcctgggagacagagccagactccatctcaaaaaagaaaaactattatatatacatttatatatataatttattatataaaaatgtattgtatataaatttatattaaatacaatttaatatgatgattaaaagttatatgtttattttaatacatgttagaagaaaatttaagcatatctcaaacctgtaattttatggataatattgcataggacaaagatgttttgtctcaaattcccgtcctcaagcaatccacccacctcaacctctcaagcagctgagatcacagacgtgagcccctgcaccctactaggacaaggatgttttgtaaagtaaatttatttaggaaaaagcataaagcaaataataataacagtggtacaagctgtagagaaaaatcataaaatgtctacaaatgtctgaggtttgcattttagttactcctaggaaattagggtcacatagcactgcagaaaaaaacaactgaaaatcgtagacctgggctttagctctagatttgtccatttctaggaccccactccctggacatctctgtgacctccctgctgggagtaaatccaaccttcccagacattagaaaacatgaggaaaaccttgcatacccagaggggtttctgtgtcatagagaaaataacactgagtttgggggtcccagggactctctgtgaggtgctgacagagccaatccctagacacagcagaggtcacttatggggagcacaggtcatcctgttaagggatgggggtcccaataagccttgcttctcacagcgtggtctaaggaactgaaatgtagattggagaaaaagaggaaaagaagacaaggaggcaggactgagaggggaggaggcggaaaggctacctgtgcagatcctcattgccacttacctttccccgcccccacccctggccctgggaagtgcttctgccctgggaggaggcttagcacagagagaggaaggacagcagagctgacagtcacagtagctctgacaagagcatttaatttatattaaatacaatttaatataactattaaaagttatatgtttattttaatgcatgttagaagaaaatttaagcatatctcaaacctgtaattttatggataatattgcataggacaaagatgttggcatctgtgacctttcgacacatccccattatttctcagcctgttccttactttctggcctccttattttctgaagcccaagctcctctccacagaggaggacaaagcagacagcagagcccatggggcctccctcagcccctcctcacagagtgcacatccctggcaggcgcttctgctcacaggtgaggggagggctccctgggagtggatgggaggagggagcacagagactggctggggtttcttggagagaacggggacctgagagggacagagggcttctgttggacactaaacaggaagaagggattacaacaggaaaatctaaataatctgaggttgttagtgaagaaacaatctcgattgttaatgttttccaagtgaatcatcactgagcagttaatgttgaaaacagatgacaataatcacaatttaagttggggtaatactcaagaaaaaaaacaagggacactaaacagagctctgtggcagcactcctcatataggggcaccagctgtgggggacgggtgaatagtgtacactgacacacacatattttgctttgccagtccagctgagtctgtcagggccgcttacagactccctgctgagtcctataaacagttgtgaccatggccttgatcagctagtgagactcatatttattcagtaagattaattaacaaaggcttgagtcaacaccgttagagggtaattgacattgtggacttcccaagtagaaagcaattaagcacctgtggcacatcaatggttagtcttaagatcacatgagtaaacaagctggctagacaaactactctgccttcctttgttactactttaatttgtttaactaaaggtaaagggaccaccttcagtcagatctattaccaaagttatgcaaagtttttggtcttccaagaagatttgtgtctatctctataactatctctaatatttttcccaccagcctgattgaactccaacagagctcttagccaacaacctcagccattggaaaataaatcccacgttgtgaagggccctgggaacactcatgagctcatccacaggagtccgcagcctgtcccaggcactggggtgcaaccaagatcacacaagtccctgttctcacagagctcatgctctcatagggaggaagacagacatgcaagggtatctagaatgtgaggtcaagtattgacaagagccctggagggaacacagcagcgaaatgtcagaaagggaagacccagggtctctagaggtgtcagggaaggggtctcccaaggatgccctaatgtgagcaggacctgaaggcagtagggagggagccaggcagacccctggggaaaaggactccaaacagggaaatgccaaggtcagaggcactgaaggaagggaggtcatgctgctgaccttggcccagtaggacacgcacgcgcgcgcgcgcgcgcacacacacacacacacacacacacacacacacacacacactccaaggctgagggatgaagagacctgtccaggacctagggccccatctttccacctcaatgcatagggcccagtattaactgatgctctctccccactcctagcctcacttttaactttctggaacttgcctaccactgcccaagtcactgttgaagctgcagaaggcaaggagattcttccactcacccacaatctgccttaggcttggctacaactggtacaaaggggaattacaggatatgtactaggaactcaagtaattaccccaggacctgccacagaggctgagagacaatataccccaatacatgtctgctgatacagaatgtcaccaacaatgacacaggatcctacaccctacaagtcataaaaacagatcttgtgaatgaagaagtaactggccagtttcacgtacacagtgatgtctcatgagctctgggtgttgggggtcagttctgcttcacacacacaggattttcaggcctgggctgtgcctgtgtccccctctacattacatcccatttgggggtttggacatttagtgcaagacacacacaggggagacaaacttccacagatcagaatttctttcctgcatccagaccctgcaggcacttgctacagaggaaggacagtctgatggggttggggggaggctcagtaaggggaggtcagtgtcagttccccctcctgggtcccctccccatggacgttccttgtaggaccatgtcagatcctggagtgaggggacccctgggaagcccctgttcagaaactcagccctggaaacccctgtccagtcccctgtcccaggatcctgactccatgtgaccctgggaagcctgtgccggggctgggttgaggcatcttgggcagggctgactgggaacaaggatttaccagctgtccaagggccatggctcttgcagctggtagccagccagggctcagcccccagagcctcatctgggcaagggcaaagcctcgtccttcacatgagacttggtatggagaagacaggtaagctccctaggacattagccgactgccctggggaacttaggagactccaagggaaggtcagcatccccaggggaggaatagagaagagaggatgttcccagcagctcattgtccaccagagatcaggcccagggaacactctgttggaggcaaataatcagagacggtgtattcaggcggttccttggtaccaacctttaggtcaggtgatcgtgaatattttaaaagtaattcacagacaacatggcaagccactgaccatttatcattgttggcagaaaaatcggagatctgtacgtttggaaaggagactttatttcatatatttttcattttatttttctatttttatttttttttagagaccggttcttgctctgtctcccaggtttgagtgaagtggctactcacaggtgggaccataattcactgcagcctcaatcccccgagctcaagcactcctcacacctcagtctcgagtagctggaactataggcatgcaccactgcacccagatagtttttaaaacaaacttttatcttaggttcaaagatacgcatgcaggtttgttatatatgtaatcaggggtttggtatacagattatttcatgatccaagtactaagcataatagccaataggtattttttctgatcctcactctcctccctaaaatttttttaagagacaggatcttgctatgctgcccaggctagtctctggctcctgagctcaaactattctaccacttcaacctcccaaaccactgggattacaggtgtgagccactgcacccaaccaggttatttcttacacagggttacagcctgcaggctggccattccccagggtagaagatgcagcctccagcagagaccaatagcaggcacttcaagggaggggaatgtggaagatagatttatgctgaatgagttggccaggtatacatattcaacaggttataggtggagctatggatactcacaaaggaagtacacgcacatgcgtgatcaacaaacatgcatgctacatgcaccccatgttcactttggggtggagaattcagatttaaatgtattaagttaggtcttatacatcaaaagatgaaacaagcattatggtactcagtgcaccgtgtctgtataccagcagaaccaggccatgctcagtggtctcttattaggagaaagttactgaaatcagtctcctgtccaattgaagtgtagttgtggctgttggaacaggggtcagttagccagtgttggtggatgagccgcgatcatttcaatattgcttatctcgaaggctagtgttactttagccgctagagagaaagaaaattctgtgttagaacatagcttattctttaaatgtaggaaagtgtggcttagcccttgcctgcatgaccttaggttgagtttataatttggtatcttatggccacagagagtctgttctgtcagtctcatgatctcgattttagcgttaatgctagtcagttgtcacctctaaacttccaaagggaggggctgtaatgaggtgtaacctcccatcctgtcatgatcaggaactctgggatccgcttggccaagaggccatcctttcagttcactggggaattagaattttatttttagttctcattgtgtgtcctattttactgaggggaaactgaggcatatgaagatacagccactggccagggtacacagactacagatggcagagtcactcgaggtcactccctccctccttcatgagagaactactgagcgagtgtgtgtctcatattgggccctgtcttgtgcagggtgtgagtggggagagaaagcaaagttctctcctttatcctctcataggagtgacaccaacacatcgggaaacacaggatttcaggtccagtgaagtgggtatagatctaagagaggaggcctggacattcccaacatggatctgatggttgaggcaggtgatagcgttctaagtaaaatctgattaattcttcatttgttcctcactccccagaccactgaggcgtggtattctccccaccgagctgtgaaaccctaagaagaagggagctgaaccagtgattgtgaaacagcatcattcatctggggtaatactcgaggttcattgtcccatggccatggaaaactaggatgcaggcacccagagtgaagttaagagtggaagtttcataggggaaagaaagagaagagctctctgcacagagagaggggtcctggggaaaatgggttgccacttccatagtgaaatgcagaaggttttatagatgagcttcaggaggcagtgtctgatttatacagggggtgaaagattgtttagaccagctgtgccatttgctggctgccccactctgatcttttgtcatgcagatggattgtctacctggccggtgccatgttgcctggttttttactgtacatgtggtaatggagaaaagggaggatggagtctccatgttgaacatacctggcttccaggcagcccttttctattggcacacctactggaattcacctgtgcaagcttccatcttgctcatctacatctgtagctcaatttttcaggctgctctttgttagaaaaggaattatcttgggctgctttttgttaaaggggaaaccttgccaaggacgctcttaccctcactaacttcctaaataatttctttctagctcctgtgtcagttggtctggggtccacagataccttaaggacccagggatggaggagaagacgtgccctcagcccactttcagttgagcacctccactgattgtccacagggtcagtggctccgaccccatctgagtcagcaacaccagagtcacagaagaaaaggatgttgtgatcctgacctgccccacagatgactctggaaccttatccagtggatcttccatgaccagcgtctgtgactcatggagagaatggagctgtcccagggccactgtatgctcagcataaaccccatcaggagagaggatgctggggagtatcagtgtgaggcctccacccaggtcagctccaggaaaaatgaccctctcagactgactgtgaaacaggaaacatctgagtcccctcttagaagttattaaaccctaaatcaaatattctttgtttggaggcattttattataaaaacttgatattcatatacataaactaatatgaagttaaaaattcattatacacctactgtttttagcttgatcttgcagtaaatctttagcttcattgattgtggctactatataaggagaccctcttttgtctgcgtgatttaagagcataacatgttaatgagcatctcttatttttttctttattggcagtagggcttaccctactattactagtgttcattcattatctagtattaatgctgcttcccgttttgtcattttgggttcatatccacctctgtagtaataatctctgaaggcagattttggtagactttgaaacacttgttctacttgaggttttatgtgcttcatggcttcgcaaaatgtaacagcttgcaaatcctgcagcagcggtcagttcagctgctaccactgcacaggccatggctccagcttggctcccctgccaccaccaggagggtggatcatcccagcccagaggccgcacccaccacctacttggctttaccagagagcaatgcagcagccaccacagtagtcacaaactgcccaagcacctttttcctctttaaagtggtggtgatgatgcatttactttatcgagctattgtgaatagtcaatgaaatcaggtgacttgcattgaatcaataaaaatgaaacaccttggaatgacattgtcattgttggcttaaggtcccattcagtaccagattttactgtttgttactgtcagttgcaccatctccacagtggtggcaacacatgtccctcagaggatggaccatgattgtgtgtgagggtgggaacacatgatcagctctcaggagtcaacagctccgtccctcctccagcaggaggtgtggatggtgcctgcactctgacatgggcaaagagaatcaacgggagggtgccatgcagagaggacaccccaaatgaaatgcacttcacacaatgcatctgcccatgtggtcctggccaggactggggagggaagggcttggagatcccagatttcaagctgaagccctgagacaaggtgcaaccgctgagagaaggagcactctgtggagagattcccacccacatctacagtctccaccccatcttatcccataaggctggcatatccctgaagggcagtgtgaagaagggacaagagtcttctctagggaggacactctgggccaagaccaaatgaaagctgggcactggcaaggacaagatttcttccaccatgagatttcaccattgtcctgaagcaatgaacccaggccctcttgctcatgtgaaacaccgcccggcctgaatcatgctaagggtgaacccaaggccctggacaccaccaccctccaggcctgtaccagcccctgcaggactcattcacctgaaccagcatcctccagtcctcaggctaaagggagaggtctttacctctttaagctacaggagattcccagatacccgtatgtccctggagagagagtccacaggttgtccacttggacctggcatagatcttcctctcaaacgccccaatgcccaggtgctcttcctcgaagatcttcctctccctacaggctctaggaactgtgagtccctgaactttcattagaaggaagctttcccttcatcctccctgaccctgtgaggggcagctgggcaaagtggacaccaagattaataactccagagggaaccctccctggagcacaacacccagggcctatgggggtgttccctggtggtcctggccagtggtgctgcccttctttctacttccaaaatcccagaccactgctgctctgactatgggctccactccctcaacccattcttttattaaatgccttttctgcacctgctggagtgattatatggtttttgttcttggttctctttaatgtgatggatcacatttattgatttgcatatgttgagccatactggcatccctgggatgaatctcacttaatcatagtgaatgatctcttttgatgtgttgctaaacatggtttgttaatattttattgaggacttttacatctatgtttgttagtgatgttggcctatgttcttttttggctttgttttggttggttgtttttgagagatggagtccccctatgttgtccagactggtcttgaactcctgggcttaagcagttctcccacctcagccttccaaagtgctgtgattacaggcaggagccaccacacccagcttgctttttgtttttgagagagcatcttgctctgttccccaggctggagtacagtgacacaaacatggctcactgcggcctcaacctcctgggctcaattggtcctctcacctcagcctcccgagtagctaggactaaaggcacatgccaccatgcctggctaatttttttctttttttttttttttaagagattggttctgactatgttgcccaggctgatctcaaactcctggcctcaagcaatcctgtagtgtttttttgtttgtttgtttgtttgtttgtttgtttttgtcctgtccttgtctggttttggtatcaggataatgctgaccttgtagaatgagtttgaaagtgttccatcctcttcaattttttaaagcattttgagtagaattggttttagttcttattaaatgtttggtagaattcagcagtgaagtcattcggtcctgggttttccttttgttacagtttcatgttggtttgttgggtttttctgccttttcatgcttccatcttggtaggttgtatgtgtccagaaagttattcatttattgtagttttattccattgtggtcagaacaaatgcttgatgtgatataaacttttttgaatttattctgactggttttgggacttaagatgtggtctgttctgaagaatgttctatgtgctgatgaaaataatgtgaattctgtaacagttagatagttagtgaaatgtcccgtaaatgccagttaggcctatttgatctagtgtgtagtttaactttgaagtttccttgttgattttctgtctgaaagatctggccattgctgagagcagggtgttaaagtcccctaattaatattgtattcagtctatctctccttttagatccactattgtttgctttaaatacttgggagacttgggagctcaagtgttggatgcatagatatttataattggcatctcctcttgctgaactgagcgctttatcattacatagtgactttctttgtctctttttatagtctttgatttgtagtttatcttatatcagtatagctactcctgctctcttttggtttccacttgcatgaaatatctttttccacccccttcactttcagtctatttgtatctttttacatgaagtggtttcttgtaggcagcatataggcagcattcagccactctatgccttttaattggagaatagagtccatttatattcagtgttcaatatttttaagtaagaacttactactgccactttgttgcctgttttctggttgttttgtaactcccctcttcctttcttcattttttactgtcttccttgtggttgattgtctctggtagtatgttttaagtcattgttttttattttcagtggatctatcatagattttttgcgttgcagttaccataagacttccaaaaacatagatataacaaagtatcttcaagagaagaaaaggtaacaacttatcttagatcacaaataaaataatagaaacagaaaaccccccaaaaaaactctactctttaatttcatcctttgcaaattttgactttgtctctatttacatattttatattacctttctccaaacaggtagctatttttttttaagacagagtctccctctgtcacccaggctggagtgcagtagtgcaatctcagctcactgcaacctccacctcctgggttcaagcaattctcctgcctcagcctcccaaatagctgaaacgacaggcatgtgctaccataccctgcaaatttttgtattttttggtagagatggggtttcaccattttgaccaggctggtcttgaactcttgacctcaaggaatctgccaaccttggcctcctaaaatgtattattgtttttgatagatttatattttgagactcatgctagagttatgattggattactttccacaattactatttgagtattctgggtttgtctacgtacttaatttcaccagtggattttataccttcaaatgttgttattgttgttgtggttattttgcatgttagtgttttttttttactttcacattgaagtatttagtatttaccctttagtatttacaggaagactagtctgatggtgtgaattatctcagcttttgtttgtctaggaaactttctctctcctttatattgaaggataacttcactggataaagtattctcaaatgtcaatattttttcagcattttgaaaatgtcatgtcactccctcctggtctgtatgatttccactgaaaatctcttgccacagaattggagcttctttatgccatttgcttcttttctctttctgttttaaaatcttctctttgcccttgacttttgagaattcgattattttatgccttgggggagtcttatttgggttgattctttcctctgatccattctgctgttgagagactctaataaattttcctgttcagcaaatatatttctcaattccaagattcctgtttgttttctttaaattatttcaatcccttcgttaaatttctctgataaatttctgaactgcttttccatgttttcttgaagatcattgagtttccttaaaactgcagttttgaattcttgattagagagctcacacatcaccatctcatcaggatcagtcacttgttcctcactttgtccatgtggggagatcatggttacctgcttactgtttcttgtggatgtaagtccaggtctttacattgaaggattcattatttattttagtctttgtctggcttgttttgatttttattggatagattttcttagagttctttactgctaggtcactacctccttttcatctctaagttacctttagggtttaccttggccctagtaaatgatcagagtgtgcccttcctaactgagggaggtcccaaaggggatatcctggcagtgtgggaaagctggctagatgtccatgcccaggatacctgtgaaacaaacctactacaacatggagctgctgaaacaccagtctgatttcatgtctcccttggctgagttacacagcagagtttccagggaaggagatggtagtcctgcctccccactctttgactgtcctcagggaaatttctcccttcgggcactcacaatgcttcttgtgggttaaggcagggacagggaacccaagattgtgcagaaactggttgcccgcattgatcttacatttcccagtgtagaaaccatgagttggggtaaaattttccacacacctggtaccaggcagaatggggcagggagggacattacagatggggaaatctgattcttttgtcatctgtctggagtttttttcacttctctgtggctctgaaaactgtttcattttcatatttgagttctggaatatatctggtaataattttggtgctgtatatttgtttttggttttctgtgtgaaggagtaaagccagcttgcttctatgccaccattttggaactggaactgagatatacaattttgatgtctactttgtgtctctgtgaggcaacagattcccaggggtttttttgtttgtttgtttgttttttccagatttgacaactgtcaaaattgggctatgaaatggagaagcagtatggataatcaccccattacttactaggtttcatgtaataagttttaatccttaaaggccccatttcaactcacattgggccatattcactatcttaactgaggtttcatgggatcccattttgtcaagccaatgtctaagtaccaaaaacacttctattttatttattgtctcagagcacctatgtccaatagagaatgttttacagcaatgggtatatgactccgggaaatttaggcaaagttacaggtaaattgagacatacctgtttttttcaattttatatttagttttcttctcaagataatagggacagagtgtttaaatttatgggattcccacgtgtggctacaatttgagccccagtattgattaaatccatgaatatttgtcaattagtgtatttagcaaatgtaaagttaaattagatcctatgttgtagagacacaaaagcaaattggtgcccttttaaaaatctttttttacataaattccttaatatataagttaataaatgaattttgaatttccaatagaatcaaagtatgaaattttactttgatttagttacatattatacatacataatttaactatttattatatatttatattaaaatattgtatgtgtatatatttaattaccttttattttttcctcctatatctaggggtttgttgtaaatgaataagtaacctagggctagcattatgtttgctagacctgtggtttgctcagtacttaaagtttaaagtttctcttttatttttcttggatttgtagtcaatcaaagtggtagtttcttttcttggggggtgaggttagccacctaaagctgagattcttgttttctgtctctagaatgataagaggaaaagatggaggaggaaaggtggtcagtgactctagggagtagcctctctctgggatgactccacaacgacgaaacaagcccgtcttttttttttttttttttttttttgagatgaagtctcactctgtcgcccagactggagtacagtggtgcgatcttggctcactgccgtctctgcctcccgggttcaagcgattctccacccaagtagctgggattacaggcacctgccaccatgccctgctaattttttgtatttttagtagaggcgaggtttcaccatgttggtcaggctggtcttgaactcctgacctcagtcgatccacccaccttggcctcccaaagtgctgggattacaggtgtgagccaccgctcccagcccaagcgcatcttttaagcaaaatctttaaaatggcttgtatttctagacggttaatgtctttttctttttcttctttctgtctttggatgtttacttgacaagttcctgatggtacccaaagccccctgttgttttaatcttacaacttgttagcagaataaaattgagggtggcctccatgtgcaccagcctcctaggcagctgtttctctttccaaggtgacccaatcaacccctgaggtgttgattgtgcaaccacagcaagaaatgcagaaacaagggagccactagcccgggattgccccatcacatgaagccacggctgtgtctgcagggattatccatggcccagggcctaaaattcgcatccaccttagtgactacagacactgccggtctaaccaggggcagcctcctgacaagattttactaaatggcactctgctatatccatcaggagaaccacagcttctccacacgttgtcacccatttgctttgctaacagaaatggtatcttgccctggtctccatagctcaccttggctcaaccttgggacagtgaaagaaaaagtcaatacatggcacctccatggggaaaataaatgggaaatgtcactcctcactctaaggaggagtggagttcaccctctgtggatgccttccctattaggattccagaaacacacctagcccttgccctagatggagaatcccccttctcatggggtagaccaccttgggagcacattacaggttcctactcggtaacaatttggggagaacaacatggcagcactctacagcagcaacacagcagcacacagtggagcaactgaattgcactgaacagaacggcctcaccagtgaggcagccacaccggcgaggatgttaaaagcctcagcagctccgagatatcttgtgctaaacagaagaggtagtctattgtgccgactacaccaatttcttaaatttgcgatctttaagatgcagagctcttgccaatgattgcgagagacataagatgaaaataaagatttattacttacaggtcctgggggatacaggccctgtctggaggacacacacacacacacacacacatacacccacacccacacacacacacagaggtcaggggcagtatggggaggacagagggggaacccatgggtcaaggcctttattagggtacagaatattattcaaacagattgtcctcagggagttttaattggtggatttaatgcaagcagacatgagatccaggtaattagaggtggtcactgcagcaggcagggtgtggggtcagtggggcagtcatacgggctgtatccggaagtcccatagggaggaggtcaccaggaggcagttgtataaatcagatatctgatcaatcacactgaggaactggaaggaggtggagaactggaaactatttcaaaggtgactgagccctgcttctggtatgagaaagtccaacttccatccaaaacggatgccaaggcattgtaaaattgtaagcattcacaaatactttcgatgcattcttatttagctgacttctagtttttacagcccaaatatcatcatttttcattcttatttggcaacattctgttaggtgcagcatgtatggagggcacctcctttattaatacatgtggatttgctctaattgtggttttttcattggttccattgcatggctacactatgatcttttacccacacccctgttgctggatttgaggctgctcgtcacttgtcacattgacatgaccttctgcagtgaacatcctcatacacacatctctaccatgtggagtactgttcctggagctcattccttcaacatgtatttatgaagtaccctgtgctgggctattggctggtctctggctttagcagagacagaacaggcaagcttggccttctcagagctcacagcacagggaggccttcagaagtaggatagtggtcagagcgtgtgcgcgttaaacatggtgaggtcaatgttgctgtagggactaaactgcagtcccatcagaagtatatgggaatgtccatctccatgtcctcacctttcttggcataattatttgagtactgcatgtgttcctgtgtcctattctttgcccacacatcatccatatttaccctcttaaccgtccatcctccaccttgtccctaagtgctgttgttaatagccctgtggtagaccagatgccaggagccctgagatatcctaagcagctccctctgccagtccttccaagagttctggttccacaggtgacacacctgaacacaggtaacccctgcaaaatctgtgattaccacgcaaggctgacagtgagtggtgggtgttctaggaggggccaccacctccatatgcagggtcagagaacactgagtggagcaggaggctgatgactttgaccacaaggtaggtggatgggtatgtttggctttatagggaagggaagggaagacaagggaagacgaagggataggggtggggaggggaaggggaggggaagggggaggggaaaagggaaggggaaggggaagggaaagtttgggcattgcaggcaacatcacaaaggttggaacctgcctctggggtacaagaacagcaaggaggccacccaggatgcagctgaggacggaagacatggggagcagtggatctaggggagaagcagactgtgattgaccttgggggctgggcggtgaacagaggtgtgttatgtgtgtctgtcccagtcacagatatgaggaggagtggggccgcaagtggcacctggttcggtgggatttcctaatacctgctgttcatcagagcctctccatgtagcatgtcagtatagatctgaggctgtgtctgggagggggagctggtggtccaaggcagcctgtggtgcttactgtccctaggggtgggaggagagggatgaggacacccctgcgcagtgaagcctcaggtgtgtggagccacaggtatctcacctggtgattcttgtcagacacgtgccttgggtgaggatgtcagggtgagagtcactgtcatttttcttaaaatgtacatggcatggacccaggtattcagggacccagagaacaaggcccctggtgagagagggttgcatggagctgagcagtttcatgtgctcagagtgggagggactcctgaaaagacaaagcctcaatcctacctgtcaggagccatgcctatttccaggagagatgacaagggtgacccaggacagacattgagtgtgaggacaggacagagaggaccctggtggcttctcaggtgtgggaatgtgaggtggggtttgttcccatccaaagcacagaagccctccattgtaccctgagtgctgtgtgtgactagcagggacactggatgggttggacctgtgcctcttgaaggcagggctggatctgtaggaccagagatgcctctgtgggtaagaggtgatgggaatgaggaagatgggggtgactgtgaacctattttagttccctggggatgtgtgctgaagaggaagtggcctagaacattccttttctgggtaaagtgaagcggggaagcagtgtggattctttttgttttgttttgtttttagatggagcctcactctatctcccaggctggagtgcagtggtgcgatctcagctcactgcaacttgtgtctcccaggttcaggcaattctcctgcctcagcctcccgaacagccaggactacaggcatgagccaccaggcccggctaaattttttgtatttttagtagagatggggtttcaccatgttggtcaggctggtctcgaacacctgtcctcaagtgatctgcctgcctcagcctccaaaagtgctgggactacaggcgtgagccactgctctcggccgcggtgtggattcttcagtgtgttctgatagccatgtgtcactacacacttgttctttatgtcttcacatctcatcctgttgcattttaaagcatgttcatagtatgcagttttgcctaataaagcattctcatatatacatacatatagatagatgatagatagatagatagatagatagatagatagatagatagatagatagatagatagatattcagacagatcttcaggccccacttgtccctgaggaggattatttgcctatggaaagaacaagcagatggcaaaggcctctgacaccaagcacaaggctcagcctggaggagctcacagaggagcccaggagatcctctcaagcatctcctcaagggctcagctggggatggaggagcaggatgctgagctcagcggatgctccaggctgagtgatggatgtgcttcaaaggtcaggcacagagaatcagacgttaatcatggaaggttcccaccatgttgtaggcagagacagtggcctgagtgtcaggggcagggagactcaccatgaggccaaagcaggctgtgagccccccaagagaccacatcctggatgcagcaagcagccctgcagggagtggcagcagatgtgctaaaaaccatgatatccagacatgcaaaggtttcgcaatttatggattagagaagaatagcattatccctgtaatagcttcctctttcttacactctttctcatatagaatagaatgggcagcttttcctgcagttccctcctatctgcatgctccctgctgccacctggaaattagcctcactgagtcactgtccgtggtgctgatgtccatgaactattgaagggccggtgagttgtgatctttcagtcacctctgctttctgttattcttagcaactaagcatgtcaccaagaagaaggtggagaggtactaggggcatggagagccctccgtctccctctctcaggatctggagggtgctggggatgttaatgcaggaactgacgccacagtcatgatgaacccatccaggtgcccatgtgtagtttgtagtgaacgatgatgagaagatggccttgagaggagtgatggacagaacaagggcctctcaaagatgtgtacatcctcatccccagatctgtggacatgtcacgtggtaaaggacactttacagattaaaggaaggatcatgagatggggaggttgttgtggtttatcccaggtgcgtccaaaataaccacaaggctccttccttttaagtgagagagggaggtgggaggaggtggagatgtggggatggaagcagggcacagaatagtttcaagatgctgtgctgctggctttgaagatggagaaagaggacacagccaaggttgcaggaggcctctaggaggtggaaaaggagaggaaatgcactcttccctggagcctctagaaagaacacagccatgtgggcactttggttcaggtttctatgtcactaagcttgtggtaatttgtcacagcctcaacagaaaactaaagaggcctcaccttgtctcatctgacgctgtgtgcaggtgggatcaggggtcatttagagctaaatcctgatgcaaatcccgatataaaacaacccattgcgggttgttttcttacctctcatctcaggacgaacaacctgtggcagtggcagaacactcttgggaactgtggctctgtgctttagtgcaggcaccagctcacttgtgggaaggtggcacctggttcaagtgaacctatatgagatcatcacccttccaggggccctcagggaagggctgagaactgctgtcccaggtgtgtggaggagctgcaggcgagatagggctgtgggccagggagaggagcagacaggttgtcccatcgccatgggagcctgcatgagctttagatgggggagtcctgcacctctgacctggatgctcctgtgtaaagagttggcttgctcagtgagatccatgccagggggtaaagtgggaactgatgagcaatgaggggccagagtcctgggtagtgctcaaggactgaattatgcgtctgtattaatcttggttgctctgacagcccctctctgtgccccaccagggataaagatgtcctgagcagtagccactgggacagaggagaacctagtggccaggtataagcacacaggatcctggatttggggacaggtaagttcatttgtggaggacagtgatagactgggcctccagggcctgggtgaagagggcagcaggggtcaggacactggaggctgcgtaggggccacagccgcaacctataccacccatggttgctcccgcattgctcaccttttgtggacatcagatggccccatcttctgtgctcctgagaccccacatgcattcacagagggacccaggctggggctgtgcatggccttggtccctggggtagtgtgaggacagctgagcgctcggctggctgggcagggctcatgtgaatcttgccctttcctgtgtagggcccaccccagcctgactcccaacccctatttctgcctcccagggaagagagactgtggttgagacaaggtggagatattttccctgtgtgacccgggagagaatggacacggagtttcaggtgagtttctgctaagttcccgtgagcagaaaaagagccaatgagaggaagggtcctctttattcagatcctttcctggtgaccccgggtgggccacaggcccattcactttccttgcaagcccccgcttcctgtggtgatgagaggcctttgtcccggcccacccagagcccagggcaacctgtcagggtctccagatattcagcagggactcccatccctccctgtccccaggcctgtgtctcctcaggactcagagctggttctctggctcaggctccatgtccttccccgtccccagggctgggagcttcggggacgctccatcaacccacaagagcagctcccagaggaacctaagagaccacatctgctttgtggtcgatctggcagtaaatgtttgcatcagagtatagcaattcctgtaaaaacagagaagaggcctcaacccctgtagccttctcagaacagtgtctggcatctcccaggctctgggcccacccagggcttctctggggctgaacctggctgtgctcagggggtccctgttcccaggcccctccctcctctgctcaccaccacctgttctcattttcactgcattttcctgaatctgagctcagccaggtgctggtgggggcagatcctgggtcccctggagcctgcgggaccagaacatccatggcccacactcacctcatagatgggagtggctgttctggggctgggtagaggggcctgggcaggggagagaggagatgtcaggggacagggagggagggtcacggaagcccagcctggaaggttcctgtctctgatcggccaggacttacttccctgcctccacttccactcatttcccctcaggattgaccagctctgcccctgagctcagcctcccagtgtggacacaacaccctgacccctgtcctggctgggcccaccccgcacccttgttaatgtgggcctctgactgatggtcccagtgtccactctgcacctgctggactccagggttctcctcaggtgtagagggtcccggggaggggtcagcacatggcgtgggtggtcctggccctgtagagaggcccggatcctggccggaggcactcactttgacctgactgttctggggaaaggtgggtcagtgctgtgctgtggggttgatggtccccctgccctgagcctgcactgttgggaccccagtagaaaagggctggggagggaacaggcttaccgagaaggtggatctgtgagagggaccatggcctggggacagagacaggagtgagcagcagggtgggaggagagcctgggcccctcctgcaggagagtgtaggggtcctcagctcccagagaatcagggagagggagcctcttcccaggggagacctgagcagctgaggtcgaggaggtgacccacgacccagagcccacagatcagtctgaacaagacagtcggggtcccctgtgtcatgtttcctgacatcctccttgcagccccaaagaaagggtcagaggcccccagggggtgactggcaggagtggacaccgtagggcaggcctaggggctcccacacctgggctgaagggacactcaccaggggtggaggctgggggcggctgctccctgaggtcacgctggatgctggccctaggaaaggtcaggattattcatgagggtgcagggagaaatcacaggtttaggggcagaataaaggacaaggaagggactccattttcaaggactggagtgaaggcctcctgtctccatcagtttcgtggtaggagcggccgaggacggggagctgaggataggccttaagcagtcacgtctgtcctggccagagaggaaggacccccccaggcagatgccgggtgaggagaacattgacccagggacccaggaaagggactgaggactcagggagggaatcagaccacctgcgtttgcctgagaggaagggtcaaggccccagagggaaagcagggccggctgtgtgtgcaggacactgggggagctgggggcatggggaggcaaggagcatgtatcatattctcccagaactcagtatccctgccatggccagaccctcctttcaggcctggagatgctgaaatggggcaatggccttgtcctctctctctccaccccttggcaagagacataaaggacagcaggtcctgaggtccaggttctcccatctcacacctcagggacatcaatcacgatggggtgctgaccctacccagcctgtccaggctttgccactccccactgcgtgaccatgcccaggacccccaccatggatctcaagcctgcaaatccctcctcactgggtgggtaaattcaatgaacagcagaaggtaccaggttctgagcactcccgtcttatctccctccctccctccctcccttcctccctccaggcagctgtggctttgctgtgttagggaactaggacagcactcaggggtgcaaccttaactgtgccacattcataaaggaagaggcagcctaggatcagcagctggcaagggaggagccatggaatgagagagaaggattccttgggaggatgcggaaagcctggccctgaatacagggcggggtctccctcctccctgactggggtcagcctaggggtgggaggaggctggggaaaagctgcggtaccttccagtcctggagagaagcagaaaacacaccagggcggccaccagagccaccccaaccaggaccccagtcacgatgccagcgacggcccccacaggaaggcctgggacgttgttttctgcagaaaggggaaggcaaaggggacaaggcccaagtttgttccaagggaaaccataagaggcattgcagggcaggggcatagtcagggaggaaggaaatgctccagagcctgagtgtggtctgttgggctgtcctcatagctgactcccttgctctccacggttgcaccattttctgtgtctcagacttgacacactgggatgtaccaactcctacattctcccacaggtgcttgcacctcgccctgctcctgtacctttaaatcccttcttcctctcatgtcacacctcttccctctgttgcttttttctttttcttttttttttggatggagtcttgctctgtcacccagactggagtgcactgacgcaatctcggctcactgcaacctccatctcccaagttcaagcgattctcttgcctcagcctcccaagtagctgggattacaggtttgtgccaccatgccaggctaatttttatatttttagtagagatgaaatttcgccatgttgtccaggctggtcttgaactcctgacctcagatgatctgcccgcctcggcctcccaaagtgctgggattacaggcatgagccactgcgcccagtcttcctcttgtttcttcttttccattccatgattgtcacagagagcgagccctcactgtcaactccatgctgatgagcggggatgatgttcattgactattttcaggggtcttccatgtgccaggcacagtgggcaccaacctacctacagctcatctcatcctcacatcaccttgagggagaggggcatcaccgccatctgcagagttagaatctgagacttacagtacctcagtaagtcaaggaaggtcacagaactcgtacatgataaaaccaaatttttactgcattgttcctgattttattgccaataacaacatcaaaaaaataagaatactagttgatagcatcagttgagctctcgccctgtgtataactctgctttaatctctttaatctcctaataaacatcctcacaaccactctgagatccaggtgttacagtgagtttgatctctagcatatatatacatatatatagatagatagatagatagatagatagatagatagatagatagatatagtagctgttgttattctttcttagcctgtccatctctctgctcacagcatccgtctgttctgcacattgtctatgctttccattgcagcctttagcatattagccagtattgttttttgtttgtttgttttagagatggaatctcgctctgttgcccaggctggagtgcagtggcacaatctaggctcaccgcaacctccgcttcacaggttcaagcaattctcctgcctcagccttccgagtatctaggattacaggcacccaccaccatgcctgcctaattttttgtatttttagtagagacggggttttgccatgttggccaggctggtatcgaactcctgacctcaggtgatctgcctgcctcggcctcccaaatgctgggattacaggcatgagccaccgctcctggccccagagttgttttaaattcctggtctgataatttcaacatccctgccacatccctgccacatctgcatctggttctgatgcttgttctgtctttcgaactgcatttttttttttttttttttttttgcctctagtctgtcttgtagtttttgttgaaagccaggacatgatgtactgggcaacaggaacttgggtgagcaggcgttcagtgatgcggtggtgagtggggggagggaggggttctgtggtcctggatagagtctgtgccctgggctgtgaatgtcacaagtgcctctcagttttttctctcctttaggtgggacatgatggctagagggggctggagttggatatttcccacccccctcagtcagttaggctcccataaacccccagcaggtgaggctctggtaaaataacgatttattcctgctaactaataactatctgaacttgctaagaagaacagatgctctggcatatttttaaatatttactttttttctactccccagaaaggataggggggattattatgggatattcatagtgagaaccaggtagagctccagggtgtaaggcaaacgtgtgggactacccgcaagcctgatccctcccctgaaaaccttcccacagccctgcagccccagggtcagatgagactcagctcccaggggcagatttaggagaaacgggccagatgaatgagacatgggtcttaggctctagagggacagaaaacaggtgtggccagaacctcctaggatcttgtatccacatctctgtctctgaagaggttatagatcattcctacattcaatccctccctccttcataagagaactacagagtgtgtgtctcacgttgggcccagaacctcctaggatcttgtatccaggtctctgtctctgaagaggttatagatcattccttcattcattccctccctccttcatgagagaactacggagtatgtgtctcacactgggccctggctggtgcagggtgtgaatggggagagaaagcaaagtcctcccctttatcctcctgttggaatgatacccacacatcagaaaacacacgaaaccatttcatgtccagagatgcggggtgtggacctgagcgaggaggcctgaacttccccagcactgactgattgttgaggcaggtgatttagttaagaaaaaactgattaattctgtatttactcataactctccagaccagaatctccccctccgagctgtagacacctaagaagaaaacatccgaaccagtggctgttctgaggtccacagacacctagtaaggcaccagggatgaaggagaggacgtggcagcagctgcagacagccctcatgtgactctgccagctgcgatctgcccaccgtggccggtgtctgtatctctctgtgcctcagtttcccctccatacaatatgtaaatggaaaatggtctgaggcttgccactttgtctgtgaatgaactttaaattattcacaggatctgacatgaagcttggcacagaggaggtgttcacatcaacagcatctgttatttgcctccatgggagagcacccctgggcatgatccccggtggacaagaagctgccaggaacattttctcccctctgttcctacccctgggccactgactgcccaagggcatctcttaagctcctcattcagggggccaatgccctagtaatcctgtccccctgccctctccaggctgagtcccagggaaagtggtaggctctgtccttgtctagatgagactctgggagctgagccctcactgatgagaagcttcaggaaccacagcccgcagacatctggtaaatccttgctcccagtaagccctgcccaggagaccacaccccagccctgacacaggcttcccggggtcacacggagtcaggagtcctgaggctgggcttttgtgaggttcccaggacgccctcaggccaggccctgacccagttctccagggtctttctcagggtcaggttcatggggagggcatggggtgcttggctgagactgacctccccctgctgaggcccccccgcccccgccatcagtgtctgcagggcctggatgcaggaaaggaattctgatctgttgaagtttacctaccatgtgtgtgtcctgcactaaatgcccaaatctcaacacgggacaaaatgcagagggggatgcaggcacagcccaggcctgacaatctcatgtgtgtgaagcagaactgaccgccagcacccagaggtatgggggaatcactcacggtgtacgtggagctggccagttgcttggtcagagtcgtaactggcatttatggttcgtagggtgtaggatcctgcgtcctccagggtgatgttttggaacagcagggatccattggggtatactgtctctcgaccactgtatgcggcccctgggatatttgcttgaatgtctgttatataaccagcaatgagagggctcccttctgccgttttccccttgtgccaataataggcttgaatagtttctgaaatattgcaggccagtagaagaacatcctttccctctgcagcactggacggcagggcttcaatagtgaactggacagtggtgggcgggtgccagaaggttaaaagtgaggctaggaggtgaagacagcatcagtcaatactgggacctatggagtgggatggaaagataaggccctgggtcctcagcaggtctcctcatccctcagccttggagtgtgtgtgtgtgtgtgtgtgtgtgtgtgtgtgtgtgtgtgtgtgtgtgtgtgtgtgtgtgtccctgggtcagcagcatgacccccattccttcaacagcttggaccttggcatttccctggtggaatcttcttccccaggggtctgcacggctccctccccactgccctcagatcctgctcacatcagggtgtttttgggagacccctcccctgacacctcctctagagaccctgggtcttccctttctgacctttcccagctctgttccctccagggctcttgtcagcacctgacctcacattctagatctctttaggtgtttgtcttcctccccatgagagcgtgagctctgtgagggcggggacttgtgtgatcttggttgcaccccagtgcctggcacaggctgcagactcctgtagatgagttcatgagcattctcagggcctccaagtcctgaggtttatttcccagtgtctgaggttgttggctaagagcagtgttttatgccctggttatgtttttatttgaagtgtcatctggtatagttattatcatttttcaaaatgtagtggccagtgatgattaaccaggacgagagaacacttgagattttcctgccttttaccaattccagttcactgagattttcctgttgtgacccctgcccctctctgatgttctctcccttatccagcctccaacagaggccctcagtcccctctcagagccccaggagaccccagccagaagccctctatcccctcctacccaagagaccccagtcagtctctgtgctccctcttcccaccactcccagagagtcctcccctcacctgtgatcaggagcccctgccagggcctgtgccctccacggggagcggctgagggggggcccatggtctctgctgcctgcttgtcctctgtggagaggagctgggctccaggaacgctcttgtcagagctgctgtgactgtcggctgtcggggctgctgaccttcctccttctgtgctgagcctcctcccgggcagaagcacttcccagggccaggggcagaggcggggctcttcccaggtcacccctctgcccctcccctctcatttctgccttttttgtccctccttcccctttctcttctgtgtacattacagtttcctaaccacactttgagaagcagggttggtggagtcccctgtccccagagagggtgacttgtcacccctgcactgaccctttgggaatgtcaccacaaacagaggtactctggggtctcccaaacttggggaactgtttccttttgtgacacagagacccagctgggcccccaggtctcctcatgctccccaatactcagggagtgtgagatgatacccagcaggaaggtgacagaggtggctctgtgggatagaaaatggggggcgactacgggggggaccagtcctctctctccagtgtcaccagccttgcctctgacccagggacagagatccaggcctgggggtctcaggaggatccccagctcctggatgtggagggaggtgtcctgcatgtcctgggaagagaggactgtggtggagggaggtgggtggctctgggttctgctgtccttgaggagggattcagggagatcctccctctccgtttctgttggctgagctgtggcttagggcctgtgcatgttctcccttaccatcccgggtggcctctgtcctctgtgaaggtgattgtcctgttgtcactgtaccttccccatgcatgataccaggagaaagtggagaactgagcagagaatcctggcagagcaggatcctcagaggctccaggaaggatcaggagagacagagcaggcacatgggagggactggaagggcctgctggagcaaagtatggaaaccaggcttcacctccacctccttagcaaagccagattcctgtccaggggaatccatttcctgtgttgtctgcgtgcaatgttgcccctggagagcaagaggaaccctgtggtaaaagtcaggggcttccccagggatgctgaccagggtccacgtggtatgagttggccctggcccctgggcagaggtgggctctgacctccagactgcagggtcaggtcatccttggtcctgttcactgtgggtccccaggatgtccaactccatgcagtgcaggatgagctcagggagaggacgagagttgtccagagcactcctggtcctgatttgggagaactgtcctgcaggcggatgggctgcctcagaaagagccatccgtccccaaggtttcaaaagaagggcccagggaggtgtctctgggggtttagagagagggcactggcctgggaggtggtcctcggtgtgttctgtgttcctccatcacaacactgggagttccgcctccaggtcatctgtgtccctgtctgtcacctgccccaggcctctccacagggcccaggagctggggcagctcctacctgcaggctgcaagggatacctggttcctgtattagagcaggggaggccccgtgaccctcagtccctctgagatggaaacaaaggcagatcctgggttatcctgtcccctcctgcaggagaagttcccctggatcccctggtgaaatgtctgcagggaccataggcagatgtcccaaatactggggatctcgaggctggggaatcactccctgactttcttgtggtcattctgccctggtggaagatccacctgggatcgaatatccggagtttgtgtcagttttggtgtgtttgtgagaaagacatatgttagagcctggagggaatgtcagtgaatgatgtcagggaatgaattgggtttgcccctcactgttagaaagaccctgaattccctcccgatgctactagggtaaaagccatgttcttatgctcatttctctaaggaaatgcaaatagagtttattaaggcgtttctggccaactaaggtggattttgtcatgtagacacaatatagaccataatacatgtacatatgcaaaaacacacctaaacacatatccacaaacaaataaaaatcttacagctttcattttagaattttagtgatgagatagtaatacaaactcactagttgattaaagtcaactggatccaattgtatttctgacaaattggaatcgttaacatggataaactttatttgcccctataggtaatataatgaaggctgggggaaatattttgggtaaagcagtttctaatggcagtgtaacttataaacaaataaacaaatgaaacctctacagtttcagcatcttttttttttctgtttcacatgagtttaggattaaattttcaattgcttacactttagctagaactggctgaattgtataagaaaaaaaaatctccaactagccttaaactagattttttgtgtgggttggaggggggcgggtggtggtgatgtggtttgcttgattaacaaatgtggatgaggaaggattttagctttttttcctggctttttcttttttgcctctgcatggcaaaagaagaaaaaagtttatgtcggacagagacaccttaaattattgctctgagttcaagattttgacctgtatgatctgagagcctaacttttataaccatgtatttttttaattattgatttttaattgtgctccattataagcaattattagttagacaaacttaaatttacatttcctaaaggtgtctaagttgtttcttatcatggagttgtttaatttgtaaagccattaattttaaagcccttcaagatttcttttttaaaactctgggctagaatgccataagcagtgagttttatctcaacaccagtagaaaagtcagcagattcaaagtaggtagagaaaaaaaaatagagaatttagaagactctacatttccaccctatagatgcagggctttttaaaacaggttgaatgatgatcattgagtactgaattttccttgatgtaattttgctcataaactttaaaatgtgcacaagaaagaaccataaaatgtagccagctggagccccagaaaacctggcatgccttaatgcttgagagccccattccatttcttattaatctcttgaaagtgaagaaaattttacaaatcctgccagagaatgtcaggcatttgtaccagtgttttagatggtggcaaccacgctagtggctgttaattagccattttgtgcccgtcatttagaatgtctatttttttgtgttctgggatgattttcagaagcaagcaaggggaaaagagtcaaaccaaataaaaagaaatccagataagagcattcacaagaattttaacccaggcatgcagatttttaaagtatttaaattaggcacacaggccaaaatggaagtaaattcaccagaatagacttgcctcacaggcagaatgtaaattttgtagaatccagagtacgtgatctagaaagatatacgcctttctctcagaaaggacttgctagaaaagacaaaaagttttttttttttttatcatcccaggagaaatgtatggtcttttactaaggcagccttatccaaatcagattccaaataaagtcaagagcttctaccaaaaagaggctctgcttgagcaaagacttgtcagggcaggaaaggtgagtgtggaagcagagagctcaaacttctcaagtgagtagtgcacactggttcaaagatcacagatttcttctgatagtgatctttcccagatcccacttctgacaccatatatggtaacaaacagagtgaggctttctatgagaaactgatgtttatttgggagtagcacatttcaatggaaatgcatgtgccatagtaaaatgatctacatattcgagtttttaaaggaaaaaattgggattattatctagtcattttgaaaaaaaaaaaaaaaaactagctacaaagatcaatagccagaatgatgccactgtgaggttctataggcagttgctgggcagatgtccttgcagaagtagttttcatataaggttgtgatggcctttgtataaacttgtggcttttgcagagtcttttgtgatagttttgttatcaggcatgaggatcctctcttcatggtcttctctggctctatttgtcagagttttttttcacactagtgactcattttgactctgacaactttcacatctgttaatacttaaagaataaataaaattaaaaagactgaagtctagtagaaaagtaggcaaatatataaacagtttacagaagaaaaaacaatttgaatgattcgtagacatatgaacaaaatacccgcacacatgcaggagaaacggacattgatattatcctggaaaggtgaggatcataatatggcccagtggttttaaatgctgaaaaattccatttgataacacaacgtgtgggaagaactttggtaaaaattgtacttcctaactttgttgggtgacatgaaaatttgtaccaactgtgtggcatcaaatttgtcaacacttatcaaaatttaacatatgcattctctttgcctcccaaactgcactgcaaggaatttatcacacactcatgaaaaatgacacctaatcacggtttctcatggcagtgatggcttaacagcaaaatactgaaaacaacctacatttacattagcatagttaaacaggttatatacatttacacaatggaatatgaggcagatatgtaaccaacagggaattgttttagccactgatgcggaaactcctccgtagtgtttttaaattatatggcataaacaacatatagcctatgtgtggttttcacattgaatgtgatcttaattttttttttttttttgagacagggtctcatcttgttcccaggctggagtgcagtggcatgatcttggctcactgcagcctcaatctcccaggctcaagtgatcctcctgcctcagcccccgccccccaagtagctgggactacaggcatgtaccaccatgcctggctaatttttgtacttttttgtaaagacagggtttcaccatgttgcccaggctgttcttgaactcctcagctcaagtgatcctccagccttggcctcccaaagtgctgggattacaggcgtgagtcatcgtgtccggcctaatctttttaaactttagagttgagttcatatgtatttattctataacttttgttttttaacttaatacttctgtatttggggtatttttttctattgtccacttttctggtgtgtttccatccattgtttttgactgattcacttctttgacttaatgatatggtatatatatatatttttttttctttttttgacagagtcttgccctgtcactcaggctggagtgcaatgatgccatctcggctcactgcaacctccgcttctcgggttcaagtgattctcctgcctcagcctcctgagtagctgggattacaggtacgtgcctccacgcccagctaatttttgtatttttagtaaagatgggggtttcaccatgttggccaggctggtctcgaactgccaacctcatgatccacccgcctcagactcccaaagtgctcagattacaggcgtgagccaccgtgcccagccccatgatatagtatctttttcctttaatgttatctcctacatctcatcacaaacatttatgtatacttcacaattaccttctggttcccaaattatgactcttgcacagtgaggattcttcgagatctctccctgttttcagcactccctgaaatgttttcaaagcttcctttatattgacatttatggatattttgagctagtacagatttctcctactccaagatatggattcacctgtgcctccaggagcactggctcgtctaataaaaataagaattagaaaataaatcatatcacagaccacaaactggacccatggggtgaattttaattgttttccatgaatacaattgcagagaggataatattgttaccagtggaaggtgtccaggttcttggtgtattggacaaaacgcacaaacaaggcaataaaagaatgaagcaaaaaacacagattcatttaaatgaaagtacactccacagagtagaagtggcctcaagcaagcagctcaagagtgctggttatagaattttctggagtttaaatatgctctagaggtttcccattggctacttggcttactccctatgtaaataaagtagtggcctgcaatcagtctgattggtcgtggaaggcaaccaatcagaggctgaagtgaagttacaaagttacatccctatgcaaatgaagactagacccttgaccagtctgattgttgcaggagggaaccaatcagaagtactttccatttctcatctgcaatgcagaaaaaggtggggttgtaaagggtgtaccctctgtccttttgttcttgggcttgggaagtcgaggttgctttagagtggtcaaagggcagggctggggcagaccccaggggcagtatggaggccccccagtatgtgtcctggaggagccgagctctcacactcggaatctgtccatccctgagttagcacccagttgcctggaaccccctcctccccacaacgaccccatgacctgtgcagagtgggtgccctcagcacctgcagcctctccctatcctgatagcagccatttttcttattttctcaataactcaggaggacacaccctcacctgtggacctagctctttttttttttttttttcaaattatacttgaaggtctggaatacatgtgcagaatgtgcagttttgttacataggtgtacatgtgccatggtgatttgctgcacctgtcaacctgtcatctacattaggtatttctctaatgctgttcctccccttacccctgagccccccaacaggcctcggtgtgtgatgttcccctccctgtgtctatgtgttctcaatattcactgagagacctctgttctgttccattggtctatctgttttggtaccagtaccatgctcttttggttactgtagccttgtagtatagtttgaagtcaggtagcatgatgcctccagctttgatctttttgcttagcattctcttggcaatatgggctcttttttggttccgtatgaactttagagtagttttttctaattccatgaagaaagtcaatggtagcttgacgagaatagcattgaatctatacattactttgggcagtatggccattttcacaatattgatttttcctatccatgaacacggaatgtttttccatttgtttgtgtcctctcttatttgcttgagcagtggtttgtaattctcctcgaagaggtccttcacatcccttgtaagttgtattcctaggtattttattctctttgtagcaattgtgaatgggagttcactcatgatttggctctctgtttgtctattattggtgtataggaatgcttgtgatttttgcatattgatttagtatcctgagactttgctgaagttgtttatcagtttaaggaattttggggctgagatgatggggttttataaatatacaatcatgtcatctgcagacagagacaatttgacttcctctcttcttatttgaatacctttatttctttctcttgcctgattgcctcggccagaacttccaatactatgttgaataggagtggtgacagagggcatctttgtcttatgccagttttcaaagggaattcttccagattatgcccattcagtatgatattggctgtgggtttgataaaaatagctcttattattttgagatacatcccatcgatacctagtttattgagtgtttttagcatgaagatgtgttgaattttatcaaaggccttttctgcgtctgttgagataatcatgtggtttttgtcattggttctctttatgcgatggattacgtttgttgatttgcatatgttgaaccagccttgcatcccagggatgaagctgacttgatcatggtggataagctttttgatgtgctgctggatgtggtttgccactattttattgaggattttcgcatcgatgttcatcagggatattggcccgaaattttcttttcttgttgtgtctctgccaggttttggtatcaggatgatgctggccacataaaatgagttagagaggactccctctttctctattgattgaaagagtttcagaaggaatggtaccagttcctctttgtacctctggtagaattcagctgtgaatctgtctggtcctgggcttttgttggttggtaggctattaattactgaatcagtttcagaacttgttattggtctattccaggatttgacttcttcctggtttagtcttgggagggtgtatgtgtccaggaatgtatctatttcttctagattttctactttatttgcatagaggtgtttatagtattctctgatggtagtttgtatttctgtgggatcagtggtgatatcccctttatccttctttattgtgtttatttgattcttctctcttttcttctttattagtctggatagtggtctatctattttgctaatcttttttaaaaaccagctcctggattcattgattttttgaagggctttttgtgtctctatctccttcatttctgctctgatcttagttatttcttgtcttcttctagcttttgaatgtgttttctcttgcttctctagttcttttaattgtgatttcagggtgtcgattttagatctttcccactttctcatgtgggcatttagtgctataaattcccctctaaacactgctttatctgtatcccagagattctcataggttgtgtctttgttctcattggtttcaaagaacttatttatttctgccttaattttgttatttacccagtagtcattcaggagcagattattcagtttccatgtagttgtgcagttttgagtgagtttcttaatcctgagttctaatttgattgcactgtggtctgagagactgttcgttatgatttccattctcttgcatttgctgaggagtgttttatttccagttatgaggtcaattctagaataagtgctatgtggtgctgagaagaatgtatagtctattgatttgtggtggagagttctgtagatgtctattaggtctgcttggtgcagagctgagttcaagtcctgaatatccttgttaattttctgtcttgttgatctgtctaatattgacagtggggtgttaaagtctcccactattattgcgtgggattctaagtttctttgtaggtctttaagaacttgctttatgaatctggatgttcctgtattgggtgcatatatatttaggacagttagctcttcttttgcattgatgcctttactattatataatgcccttctttgtctttttttttatctttgttggcttaaagtctgttttatcagagactaggattgcaactcctgctttttgtttgtttgtttgcttgctttccatttgcttggtaaatattcctccatccctttattttgagcctaagtgtgtctttgcacatgagatgggtctcacgcaccaatgagtcttgacgctttatccaatttatcagtctgtgtcttttaattggggcacttagcccatttatatttaaggttaatattgttatgtgtgaatttgatgccatcattatgatgttacctggttattttgcacattagttgttgcagtttcttcatagtgtcgatggtctttacattttggtatgtttttgcagtggctggtactggttttttctttccatatttaatgtttccttcaggagcttttgtaaggcaggcctggtggtgacaaaatccctcagcatttgcttgtctataaaggattttatttctcctttgcttatgaagctttatttcgctggatataaaattctgggttgaaaactgttttctttaagaatgttgaatattggctcctactctcttctggcttgtagagtttctgcagagagatccgctgttagtctgatgggcccttcagattgagaaatccttagattggagtcacttcaaatccagaagttatgaggactgagctgggcaatcttcattccataatacattttttgaaaagtacatgcccttcctattctatgaaaagctgccctggcctcagagatgaacacaactggcaagcctgctcatgtagtttggatgtttctcccctccaaatctcatgttgaaatgtaatccccaatgttaaaggtggggcctggctgggtcatgagggcaggtccctcatgaatggctaggtcctgtcctcatgatagtgagtgattttgtacaaggtctggttatttagaagtgtgtggtgccaggcacagtggctcatgcttgtgatcccagaactttgggagactgagggaggaggattacctgaggtcaggaactcaagaccagcctggccaacatggtgaaactccatctgtactaaaaatacaaaaattcgccagacttgatggtgcacacctgtaatcccagctacttgggaggctgaggtagaagaatagcttgaactcaggaagcagaagttgcggtgagctgagattgtgccactgcattccagcctgaatgacagggtgagactgtcatggagtgacacctcccccctgccacttactaccactctcaccatgtgttatatctattcctcttccctttctgccacaagtaaaagcttcactggaagccaaataaatgctgtcaccctgtttcttgtgcatcatgcagaaacatgagccaattaacttctttttttgcaaattatctggtctcaggtatttctttatagcaacacaaaagtggcctaatacacctgccttccccccaatacatagaagtttatatgaggaacagggactgatctttataaagccacaaagagtgctaagaaagaatctcacaaaagtccacaggagaaaaattcaacctgatgatgaggttgcaaaatctgcgagctgagaaggagttcctattgtgggtcccacagagatgtctgggagaactccaaggtcaccatagggtggtctggggtgaaagagaggtgccaccttatccttacagattgtcacctgagcaaagactcttgatcttctgcagagggtcagggccatcccctggatggtttcctttgcacacctcatggtggaacctgagagctggctgggatctctgggaaggaacatggccccaggccccaggaaactctcagtcattcatctcctctctttgtccacagggtcagtggctcactcctccttctgaaccagcagcttacctccagcaaaatgatcctttcaggctgactgtgaaatagcagacatctgagtcctctgttataggttattaaatctaaaatcaaatttttctctgcttggaggcattttattataaaaagttggtactcgtacacataaactaatataaacttgaaatttactatacatttacatttcttagcttgtccttacagtaaatttttagcttcattgatcttggctattatataaagagaccctcttttgtctgggtgatttaagagcataacatgttgataagaacctcttactgtttcctttattggcgttagggcttacatctagtattagtgctgcttcctgttttgtcattttgggttcaaccccacctctgtcgtaataacctctgaaaaatattttggtagactttgaaaaacttgttttacttgaggctttctgtgcttcgtggcttgccaaacataacagcttgcaaatcctgcagcagcagtcggtacagctgctaccactgcacaggccatggctccagcctggctcccctgcttccaccaggagggtggatcatcccagcccagaggccgcacccactacctacttggctttaccagagagcaatgcagcagcgaccacagtagtcacaaattgcccaagcacctttttcctttttaaagtggtggtgatgatgcatttactttattgagctgttgtgaatagtcaatgaaatcaggtgacttgcattgagtccataaatactaaacactgtggactgacgttgtcattgttggcttaaggtcccattcaacaccagataccactgtttgtctcagttgcaccatctccacagtggtggcaacatcgtttccctcagaggatggaccataattgtgtttgagggtgagaacatgttatcagagggaaggaaaactcctggtctgtggaagggccacagtgtccctctaagccaagtcacaacattgtttgagaaagtaccaaccaaatttccgctgtgttcactgagcctgagtctgagacattcacctgtttctcccattacaggctgtggaccccaagcctcccatgacaggagcagtccctctccacctatttttggtcagggctgtgcccttccgggtttgcctggggcaggaagtcacagccagcctgggtatccaagggcaggggtctgtgttcttggacccaaggggaagtgaatggtttgagctctggctatgtggatttgagctggcagcctgagccccagaagaagagaagatacacgggacattcaggctaactgggtcgctgcagtcggcattcactgggttctgggttccactctcatagagtcctgtgtcactacctgtgacactgagtaaagtgaaggtcctgttgcccttggacatcttcagcctgggactggccaggaagctctgaccccttactcaccacaggtatgttgtgtcctgagtctcaggttcacagtttaacctacagagtctttgtcctccacgggggtcctgttgccttgatggagggctttgtaagctctactgtgcagataacagagagaagactgccctatggggcaccctgattactccatagtgaacatggaacgcatatagcatgcacgttttcttatcaaacttgtgtaagtcaaaccttcatgaatattaatagctcctcctaaaccctattgaatgtctacttggccaacctgttcagcgtcaaaccctgttccaccctccctccttcaagtgcctgctattggtctctgcaggaagctgcacttgctagcctgaggaatggccagcaggcaggctgtaatattttataaaaaataaaggcaccaggtgcaatagttcaggcatgtaatgccagtcctttgggaggccatagagggaggattgctagaggataggagttggagaccaccctgggcaacatagcaagaccccatctctaaaacaattttttaaaaaattagcagagcatggtagcaagtgtctgtagtctcagctatgatggaggctggtgtcctctcccttattcccacttcagcagaaaccctcgatccctctcagagccctgccctccccaggagaccactgccagtctctattctccctcctcccacccactcccagagaatcttcccctcacctattaccaagagcccctgccagggaatgaatcctctgcggggaggggctgagggggtcccagggtctctgctgcctgctctgtcctccactgtggagaagagcttgggctccagaaatgctcccaagcatggctgctctgactgtcagctgtgctgtttgtgctgaaactcctcccagggcacttcccaggtgggcctgaggtgtggtctcagcccaggatgcttctctgtcccctcccttctcacacttgcctcctttttctttgccttttccttcacttctgtctacattttggctcccccagaacatgctttgagaagcaactcttatttggaccgctgtaccataacaggatgagctgcgttcctctgcgctgacctctgctgtgtcctgggtgtggatctcttatgcaccacgcagagagtccctagggtcccccaacccagctttttcctctatgacacagaaacccctctgtgcattcagagtcttcctagtgttctctaatggctgggaaagttggatttactcccaacaaggaggtcacagagatgtccagggagagggttcctagaaatgcacacatggggctaaaacccatgtctaagattcttagttttcctttatgcagcactatgagactttaattttatagacataactgaagatgaagctgcctggtgctatagtattatgtctcccaagcctcagatatttatagaccatctctataatgttttctacagtttgtaccatctttattattattgacttcatacattttttctaaataaatttactttacaaaacacccttgtcccagcagcgtgcaatggcttacattgtaatcccaggtacttgagaggctaagatggggggatcacttgaagccaggagtttgaaacaaaacatccccgtcctttgcaatattgtccatgaaattaaaggttttgtgaatttgcttaaaattgtttctaacatgcattaaaataaacatataactattaaagtttcttaaaagcttatttatgttccacctaaagtcagttttgggaaacactgatacagtggaataaccatggactttttatatccagagagacctgggactcactactggttctgtcacttaactgtgtcatcttgcacgagtcacttggcttctttgatcctcgattccataatttttaaaatgatgatgataaaatccactttgcaagctgttaggaataagatttgcttcagtcaggaggtggaggttgcagtgagctatgattgcaccactgcactccagcttggatgacggagcaagactctgtcaatgaaaaagaaaagaaagagagagagaaaagaaagagttacttccacttgttaggacttgtggtgcgtctgccattgttttcatttcccagttccactacctatgtgctctgtgattttgatcaagttgcctaacttttcctcatttacctaatttgtaaaatgtggggtttaccagtacactagtgtgagtgttatttcccagctctgaccactagagggcgtaggagcatcggcacccactggcaatggatgtgtcggtgcccatggtttaccaacatcattctcccatgaaaggaaccagggctccctggagaaatagctgatccagggctggggcaggaaagcacaagagaagcccggagctttttgtgaggccagaaagtaaggaaccactcgaaaaattatgggaatgtttcaaaagattacagggagcttagaattaccaattttgggacaacatgagcaacataataatgatagcaatggattccaacccataaatatccatgagtccatgctgatataaataattgaacaaagaaataaataaggaagaagaaatagctctttcttatagcagaattccaattaataaatgtagaaggaattatggaaataaaaaatcactatttggctaacaccacagtaataattgtttataggccagaatcaagaaccatccacagattctaaaaattaatgggtaaaggtaagatgatgctgtaactattgagtatgaaggaggggtcaggggaagtaaggtgagaagaaacaggctactggtttgttcccaaagtatctgtccacaagatacttattaattacaatgagatgaatagtaactttatagtagagaaacctggcaaacaccacctgaaccaagcgcttaaagtgaacctcatcggtaatgagagatatggacatcctggggctccaggtgggatgtcctgagaaagacacatcacttctgtgctaatcttacccaaaatgcataacctaaaacatcccaaggaaacaggagacaaacccaaattgagaggcattctacaaaacaactgaccagacctcctcaaaagtgtcaaggtcctgagagagggaaagagtgggaaactcccccaggttggaggaggcctaggagatgtgacagtgttattcagtgtcagatcttggattggatttgggagcagaaaaaggacatgagtgggatgattagcaaaatttgaatatttgtagatccccttggttaatgttattgcaccaatgctagttccctgatatgaacaattatattagttatagaagatgttatttgaaaaaaaaagctggataaaggataaactggaaccctatttttaaagatttttgaatgtttaaaaataaacatgataaatgaggccgggtgtggtggctcacgcctgtaatcccagcactttgggaggccgaggtgggcggatcacgagttcaggagatcgagaccatcctggctaacacggtgaaaccccatctctactaaatatacaaaaagttagccgggcgtggtggcgggcgcctgtagtcccagctactcgggaggctgaggcaggagaatgacgtgaacccgggaggcagagcttgcagtgagccgagatcacgccactgcactccagcctgggcgacagagcaggactccatctcaaaataattaattaattaattaattaatttaattagattaaataaataaacgtgataaatgaaaagtcaaaattttaaaaatgctttagatttctgtgaggccaaaatgagtgtatagtgcttagaacaatgcttgtgacataggagttcttaacatgtcagctattattataagtacttttataattaataagtaatgttataaggaaagagtaatctgttattataagtaatttatttcctaatgtcctcatatattctcatatttttttcctctctgctgttaaatccatatagagcatgtacttggttattttaagatataagattagaggaggtcgcggcgccggaggccccagaagggtcgaaggcgccgcgggctggggtcggtggcttagggagcccgtctggccatggtggccgcggctggtggttggcgcggctgcgctgcggcccggggcagtgcggagccaggacagtcgcggcgctgacgcccgcgggccccagctgcagatatgaagcggagccgctgccgcgaccgaccgcagccgctgccgcgaccgaccgcagccgccgccgcgaccgaccgcagccgccgccgcccgaccgccgggaggatggagttcagcgggcagcggagctgtctcagtctttgccgccgcgccggcgagcgccgcccgggaggcagcggctggaggagcggacgggccccgcggggcccgagggcaaggagcagccgcctgccttggcctcccaaagtgccgagattgcagcctctgcccggctgccaccccgtctgggaagtgaggagtgtctctgcctggctgcccatcgtctgggatgtgaggagcccctctgcctggctgcccagtctggaaagtgaggagcgtctccgcccggccgccatcccatctaggaagtgaggagcgcctcttcccagccgccatcacatctaggaagtgaggagcgtctctgcccggccgcccatcatctgagatgtggggagcgcctctgccccgccgccccatctgggatgtgaggagcgcctctgcccggccgagaccccgtctgggaggtgaggagcgtctctgcctggccgccccgtctgagaagtgaggagaccctctgcctggcaaccaccccgtctgagaagtgaggagcccctccgcccggcagctgccccgtctgagaagtgaggagcctctccgcccagcagccaccccatctgggagggaggtgggggggggccccccccacccggccagccgccccgtccggtagggaggtaggggggtcagccccccgcctggccagccgccccgtccgggagggaggtgggggggtcagccctccgcccggccagccgccccgtctgggaggtgaggggcgcctctgcccagccgcccctactgggaagtgaggagcccctctgcccggccagccgccccgtccgggagggaggatgaggggggggtcagcccccccgcccagccagccgccctgtccgggaggtgaggggcgcctctgcccggccgcccctactgggaagtgaggagcccctctgcccggccagccgccccgtccgggagggaggtgggggggtcggccccccgcccagccagccgccccgtccgggagggaggtgggggggtcggccccccgcccggccagccgccccgtccgggagggaggtgggggggtcggccccccgcccggccagccgccccgtccgggaggtgaggggcgcctctgcccggccgcccctactgggaagtgaggagcccctctgcccggccaccaccccgtctgggaggtgtgcccaacagctcattgagaacgggccaggatgacaatggcggctttgtggaatagaaaggcgggaaaggtggggaaaagattgagaaatcggatggttgccgtgtctgtgtagaaagaagtagacatgggagacttttcattttgttctgcactaagaaaaattcctctgccttgggatcctgttgatctgtgaccttacccccaaccctgtgctctctgaaacatgtgctgtgtccactcagggttaaatggattaagggcggtgcaagatgtgctttgttaaacagatgcttgaaggcagcatgctcgttaagagtcatcaccaatccctaatctcaagtaatcagggacacaaacactgcggaaggccgcagggtcctctgcctaggaaaaccagagacctttgttcacttgtttatctgctgaccttccctccactattgtcccatgaccctgccaaatccccctctgtgagaaacacccaagaattatcaataaaaaaataaattaaaaaaaaaaaaaaaaaaaaaaaagaatggactttcccaggccagctgtggtggctcacgactgtaatcccagcactgtggcaggccaaggcgggcagatcacctgagatcaggagttcaagaccagcctgaccaacacggagaaaccccgtctctactaaaaataaaaaacattagctgggcgtggtggtgcatgcctgtaatcccagctacttgggaggctgaggcaggagaattgcttgaacccaggaggcagaggttgttgtgagctgagattgcaccattgcactccagcctgggcaacaagagggaaactccatcaaaaaaaaaaaaaaaaaaaaggactttctcaaagaaaatgtatttaaatgtctgcaccaataattccagcatgtgtatgaataaatatgatatgtcctttaaaaaaaaaaaaaaaaaagatataagattaggtctgacgtggtggctcacacctgtaatcccagtgctttgggaggccaaggcaggcggatcacttgaggtcaggtgttggagaccagcctggccaacatggtgaaacctcgcctctactaaaaatacaaaaattagcgggtgtggtaggcgcgtacctgtaatcccagctacttgggaggctgaggagggagaatcgcttgaacatgggagactgaggttgcagtgaacagagatggcacctctgcactccagcctggacaacagagcaaggctccgtttcaaaaaaaaaagacataaaataagattagattttattttgagaattattttagggatagaggagctattatttcctttagccactaacagtagctgaaattcaggccggattgcaaaactttgcttggctgagaaacaaagcttgagccaggctgccacccaccccacgcggtttgtgatggcgccccctggcggcgcagcgagctttccggttcctcaacctcgtgctttaggagcgatattttattttattttattttattttatatattgttagttcaatagtttttggttacatggataagttctttagtggtcatttctgatattttggtgcacccatcacccaagctgtgtacactgtacccaatgtgtagtctttaatccctcacccttctcccaccccttcccgctaagtccccaaagtccattacattatcccgatgcctttgcattctcatagtttagttcccacttataattgagaacatgtgatatttgtttttccattcctgagtttcttagaataatggcctccagctccattcgagttgctgcaaaagaccataatttctttcctttttatggctgagttagtagtccatgttgtatatataccaccttttctttatccacttgttggttgaggggcacttaagttggtaggagcgactttagaaattccactcagtctattccttgaacgctttctagctcacattgtggatcctttaatcttcacaacatgtctctgtaagaagtggtatttttaacatttattttatttattatttattaatttattttgacagggcctcgctctgtcatccaggctggagtgcaatggtgcaactatgctcaccgcagcctcaaccacctccagttcatataaccctctgcctccgccttccagtagctggaacctcaagggcacaccaccgcacctggctaattttttaaaaaattttctagagacagggtctcactttgttgccagggctggtctcaaatgcctagcttcaagtgctcctcctgtttcagcctcccaaagtgctggggttacaagcttgagccaccaaagctggctaagaaggagtatttaatcctcttaagatgataaaactgaggttcaaaagagtaaagcaacttgcccagggttgcaaagggagtggcagagccagaatttggacctaggtccccctgacttccaggctgagtataaatgtctaggtgaatctaaatgtgtatccaggtagagaagtattggtgtagagcaggtgttgtcaattgggggtggtttcccccacagagacagttggcaatgtctggagatatttttagttttcataacaggggtggggatgggagagatggaaggctgctattggcatctagtgaagaaaggccacgtggatgctgctgaacaatgcacaaggcacagaacagcccccaccacaagcaattgttcagcccaaatatcagcagaactgctatgaagccctggttggacttagaaacctgaagatgcattcttgcagttagctaatgtttgccaagtactgagctggacaacgtgagggatatggaaacagtgcaccactttgtgctgccaaggaggctgcagcctagaaggtcaggggttggaggcaggagaggcgcatgaaggccttcaacataaggcagcagatgataagtgtcaagaacagagtgtccagtagggctaggccagctctcaggagggagaccacatgtctggctgtgggagaaactgagggaagctgtggaaaggtggttttgagctgggtgtgtgagcaaagttgagctgatgggaaaacacaagacctgttcagggaagggcaaaaagtctagtttgggtggggagagagtatttttttattgagtagagagggaaatgctggaaaagcaggttggggctagagctttgagtccaggctaaggactcaagcctgggtgtctgtcacagagatggaaaagcctttcctctcagaatggttgtctagaccgtagggctacggggctcagcagtttcccgagtgctctctctacaaaggaggggacattggaaattgtagtgtaggagggtgaacatctcctgattttaggaccaatttcatgctgagtatgtgacaaacccatttcacatcaaagtggcccttgggtagatggtgttcccaagtgaaaatttacatggggtgagctctcttctgcgtggttgctctgtgaaagcctgggccactttatactgaaaacccagagcagacttgaagcccctaagcaaaggtttgctaccctaaaggtgagttgctacagcaggacttgctatggataaagttgcaaatatggacactacctggtgacaggatttttctagtttattactttaccattaaatagcattaagacatgtttgtggcatgtatggtacactgtaaagactataagtaaggatttcctgaccttctatacatgtacagttgcctttaacaacctcccacctctgccaccatgtttggccccagagaaatgcattactcttctggaaaaggggttagaggagaaggcaagagagcaaatatttgttgagctagcgtgtgtgtgtgtgtgtgtgtgtgtgtgtgtgtgtgtgtatttgccagctaccgttgtggacactttcccatacagtatcttaactctcttgacaccgtttgtatataagtacagtttacttcttttgataaaggaggaagctggcactggaaaagactaacttgccctaatcccctgtagctgaaagaagctacattttgatgcatgtgtggcccactatgccacattttctcctcccttttttccattcataggcaattaatcttatccacctggacttgggctgctagagaccatggtcattagcattagtggcagcaacagaaggaggaaagagattagaactttcattgtgattgttggtgcagctgtaagtcatttgaagactgtatggaagtttcccggttggaggctcctgatctctggggatggctcaggccagggtactcagcccggtggtctgcactttagtcccaggtcagtgtttccatctgagggcaagagcaggtgaggtgatgctggccttactgttaagtaacagattagacgatgtgctttccagaaatgtaggagataaaattcctcaaacaaaaaaataagacagaaggtgttgcagcagagagtttaatacttgcaagatggccaagcaaagaggatgggagatatttttcaaatctgcctccccaagaatttggagactagggttttaaaggagtgtttggagagcaggggactaggaaatggacacggctgattggttgggctggaaatgaaatcatcgggtgtcaaaattgtcttgtgcactgagtaagttcctgggtggagctcacaggaccagttgagtcagtttcttagtgtaggtcaacagtctgggtggtgtcaattgatccaccagaatgcaaagtctaaacaatatctcaaactccagccttaaatttcacaatagcaatataatctataggagcaattaaagaacatataaatcttgtgcccactggctacgtgactcctgagcagcaggtaattataaaaacaaaaaaaaagatggggaacaatgactgtttgctgtttaactctgcctatatcttagctaaattcaggcccctaccataattctaaccttgcaacatttcatttgttttacaaagttggtttcaattccagaacaagaaggggattagttaaactataaattccttctatagttaggctggcctatgtacaggaataagcaaaggtggatagtttgtgaagttagaagcaagatggagccagttacattggatttctctcactattaaaattttccaagggtggtttcagttccccctgggcttaagcattccttattcctgaggtgtgagcagatgatgagatggaaggggttgataaccactctaacttcttcctgatgatagggggcatcattggggtttattccaggataggagaaatgaaactgtcttgctgtcgtcttcctatattcacgaatgcctggttggggacccaagttttgcatgacaaggatattagtattcacatccccagccgcagcacagtacttaagtgaacagcagactgtaagtgttgagccctaatataaagagtgaaagcccaagtctcaagagttcttgtggaactgatctgaaattttaaggcatccagataaataacaccgagaaccaatcagacatggggtcaccggtaaagacctgctgtaaccatgaagtttcttgggaatttctttctatccagatttcaacttctcctgaggtgtttatataggtgcaacaagtggtgtttcatattgcacaaattcccctttgtctagccaacaggaaatcaagcaccaacagattgtctaggactacgtgagctagcaaactgaaggaactttgttgaaccctaagggtttttgcagtttcttctagacaatcaatccgaaggtagcagacaggttcctgatcatgtctctgttgccataaacaccataactaggaacaaatatccctagaaggctctgccaccaggtatcttgatgtctgcctgaagtcctcgttttgttctatggggaaatcagtggaatttatcaccatgaagataggctgagaagggagttacaaaatgtcccggtaagcaggagcccttgatatgcaggctattgagacacaggtgggctcatcctaatagagcctgcagatacctgtatgaactggatgaattcctctctttgcaaggtcccaaagtaacttggggttcctggcctatcagaaagtggcattctttacttacttcacatcagaaatcctgtaaaggaactgcatagacaaggtacaagaccagctcttccaaggggcttttattggctctataagtcaacttcaatttctgaatgcaggctgctcattccaaagatagctcactgaaaggaaaattcaagacagggaatcagaagctgtccatgaaaggggataagatcaataaatggcaaaagtcacagagatatcaaaccagaaaaatctgcctgagccagacatcaaacccagtccactgcagtgagagggcaaaccttagccactgagctacagtgtagggcagtctccattgctattcccagaagtaatctagagcaggcagtgttcagcttacagaagatttttttctaaatttttaaattaattaaaacattatagaggagacaaacagttattcctacccttttgccagcttgtcagcttcctggattccctttgtctgtggcttccagaagaccagagttggggtcaagccatgttataaaagaaaatcatccttttccacttcatggaatcataagcaaaaggcctcccaattttgcaagatgcagcccaatgggctgcacaggagagccaaattaacatttcccattctggctgaagtgatatacacataacaaaacacagacactagtcacccaactcagcacccatgtatcaacctgacaaagctcaaacttgcccttgttggcccctatcatctttgatccattcagggtatgaagatataacctctgaccaggagttcaatgggtagtctctgggaaagatgggaaagtgactgtcaccctgagttaggctggctgagtttccactagcgattccttcagagttcaccaaatgtgactacccagataaacagctcccagagttaggcctgctgagcttctgataacaagcccttcagggaatcccctccataaacataaatgtacataacaagacaaagacagatgaatacaaattcaagaagggagggaaaaacctgcagtgaccccatggtcagggctgaaggcagcgagtgcactgcgagctttgggtttctgtggtcagcaagccagagcagcacctcttgggtgggctgagcccaccccacaccctcagcgcgctgaaacacaagagtttagcactcaaggggatgccccaaaatgctgccggtgctgcccctggacaggactgtcctccagcacatcctcagccactgaggagccatcagcttcagctccagctccatgttcttcagctgtcccaattcccggcagctatcccagaggtgtggagctatctcctatgacagttctgatcacactgcattatacctcatgtgctaggagatgtacatgtaaggagccaagcaggatttgaatctgaaagaagagattctcaactatatattgattttcatgttttccacttgggctcttcatgccagaattaaaaatttccctagatattatctgtcactaaaaggtatttgtgggaagatggtggacaggaagcaggactacattgcaactccagctcagagggacagagtggtgtgtagaatcacattgtgaactcttgctccagaactattgcaggaatataccaggaaagctgagagaatccacagatcctctgaaagaagcagattgctccggcaggacccaggagacagcccaaatactgtgctggtatccatggatgagagatctgaagatgatttacatcataggtctctgtgcagacactcccagtaccagcctggagcctggtagccttgctaggtggctagatcctgaagagaaataacaatcactaaaattcagctctcaggaagccatatccctcagaaaagggggagagtactacatcaagggaacaccctgtggggctaaagaatctgaacagcagccttgagtcccagatctttcctctgacatagcctacccaaatgaaaaaaaaacaaaaaaacaaaaaaagaaaaacagaaaaacaactctggtaacatggcaaaacaaggttctttaacacccccctccaaaaaaaaaaaatcacactagctcaccaaaaatggatccataccaagaagaaatccctgatttgcctgaaaaagaattcagactatagattattaagctaatcaaggaggcaccagataaaggtgaagtctaattcaaggaaatccaaaaaaatgacacaagatatgagaggagaaattgtcagtgcaacagatagcataaatgaaaaacaataaaaacttcaggaaataaagaagactcttagagaaatgtaaaatgtactgaaaagtctcagcaatagaattgaacaagcagaagaaagaacttcagatatcaaggatgaggttttcaaattaatgcaatccaacaaacacaagaaaaaagaatttaaaaaatgaataaatcctccaagaaacttggtattgtgttatacaaccaaacctcagaataattggtattcctgaggaagaaaagaaatctaaaagtttggaaaacatatatggggaaataaacaagaaaaacttccctggccttcctagagacctacacatccaaatacaagaagcttaaagaacacctgggaaattcaatgcaaaaagatcatcacctaggcacattgtcatcaggttatctaaagtcaagataaagaatcttaagagcagcgaggcaaaagcaccaggtaacctataaaagaaaacccatcagattaacagcagatttctcagcagaaaccctacaagctagaaggaattggggccctatcttcagcctccttaaaaaaaagacaattatcagccaagaattttgtatccagcaaaactaagcctcataaataaagaaaagatacagtctttttcagacaaacaaatgctgaaagaatttgacactacctagccaccactacaagaactgctaaaaaggagctctaaatcttgaaataaatcctggaaacacatcaaaacagaatgtctttgaaacaaatctcacaagacctataaaacaaaaatacagttaaaaaaattctaaatctcaatactaacattgaatgtaaatgacctaaatgctccacttaaaagacacagaattgtagaattgataaaaatttaccaaccaagtatctgctgctttcaaaagactcacctaacacacaaggactcacataaacttaaggtaaaggggtgggaaaagacattccatgcaaatggacatgaaaagcaagcaggagtagctattcttatatcagacaaaacaaacattaaggcaacagcagttaaaaaagacaaaaagggacattatatgatgataaaagaccttatccaacaggaaaacatcacaatcttaaatatatatgcacctaaatttatgttcccaaatttataaaacaattactactaaacctaagaaatgagagatacagcaacacaataatagtggggacctcaatactccactttcagcactagaccagttatctggaccaaaagtcaacaaagaaacaatggatttaaactataccctggaacaaatggacttaacagatatttacagaacattctacccaacaaccacagaatatacattcaattcaccagtatgtggaacgttctccaagatagaccatatgataggccacaaaacaagtctcccaggatctgagcagaaataaatgaaattgaaacaaacaaacagaaacacaaaagatgaataaaacaaaacgtggttctttgaaaagttaaataaaattgataggccattagcaagattaaccaagaaaagaagagagaagatccaaataagctcaattagaaataaaacagaagatattacaactgacaccacagaaatacaaaagatcattcaaggctactatgagcacctttatgtgcataaactagaaaacctagaaaaggtggataaattcctgaaaagatgcaaccttcctagcttaaattagaaagagttagaaaccctgagcagaccagtaacaagcagcaagattgaaatggtaaccaaaaaattaccaacaaaaaaaaaagtccaggaccaaacagattcacagcacaattataccaggtattcaaagaataattggtgtaaatcctactgacacttttccacaagatagagaaggaggcaatcctccctaaattattctgtgaagccagtatcaccccaataccaaaaccaggaaaggacataacaacaaccaaaaaaaaaaaaaaactacagaccaatatctctgatgaacataaatgcaaaaattcttaacaaaatactagctaaccaaatccaacagcttatcaaaaagatataatctatcatgatcgagggggtttcataccagggatgcagggatggtttaacattcacaagtcaataaatgtgatgcatcacataaacagaattaaaaacaaaaattacatgatcatctcaatagatgcagaaaaagcatttgacaaaatccagcattgctttatgattaaaatcctcatcaaaatcggcatacaagggacataccacaatgtagtaaaagccatttatgacaaagccacagccaacataaaactgaatgggaaaaagttgaaagcattccctctgagaactggaacaggacaatgatgcccactctcaccacttctactaaacatagtactggaagtcctatccagagcaatcagacaagagaaaaaaataaagggcattcaaatcaataaagaggaaatcaaactgtcactgtttgctgatgatttaattgtacatctagcaaaccatcaagactccttcaaaaagcttctagaactgataaatgaattcagcaaagtttcaggttacaaaatttatgtacataaatcagtagttctgatacatcaacagtgaccaagctgagaattgaatcaagaactcaaccccttttacaataactgcaaaaataaaataaaataaaatacttaggaatatacctaaccaaggaggtgaaatatctgtaaaaggaaaactacaaaacactgctgaaggaaatcatagatgacacaaacaaatggaaacacatcccatgcccatgcatagatagaatcaatattgggaaaatgaccatactgccaaaagcaacttacaaattcaatgcaattcctatctgtattagtccattttcatgctgctgataaagacatacctgagactaggcaatttacaaaagaaagaggtttaattgagggtatggcaaggtggccaaataggaacagctctggtctgcagctcccagtgagaccaatgcagaaggtgggtgattctgcatttccaactgaggtacccagctcatctcattgggactggttaggcagtgggtgcagcccatgaaaggtgagcagaagcaaagtggggcatgacctcacccaggaagcacaaggggttggggaactccctcccctagccaagggaagccatgaaaggctgtgctgtgaggatggtgttatctggcccatatactgtgcttttcacacggtccttgcaatccacaggccaggagattcccttgggtgcctacaccatcagggccctgggtttcaagcacaaaactaagcggctgtttgggcagacaatagctacctgcaggagtttttattgtaccccagtggcacctggaacaccagagagacagtaccatttactcccctggaaagggagcttaagtgaggcagctgagtggtcttgctcagtggagtccacccccacagagcccagcaagttaagatcaatgggcttgaaattctcgctgccagcacagcagtctgaagtctatgtgggaagcttgaacttggtggggggaggggcgtccaccattagtgaggcttgagtagatggttttcccctcacagtgtaaacaaagcctccaggaagttcaaactgggtgcagaacccacagcagcatggcaaagccactgtagccagactggctctctagatttctcctctctgggcaggacatctctaaaagaaaggcagcagccccagtcagaagcttatagataaaactcccatctccctgggaaacaacacctgggggaagggatggctgtgggcacagcttcagcagacttaaacgttcctgcctaccagctctgaagagagcagcagatctcccaacacagcacttgaactctgctaagggacagactgcctcctcaagcaggtccctgacacccgtgccacctgactgggagacactttccaacaggagtttactgagacctcatacaggagagctctggctggcacctggtgagtgcccctctgggatgaagtttccagaggaaggagcaggcagcaatctttgctgttatgcaggctccactggtgatacccagacaaacagggtgtggagtggacctccagcaaactccagcagacctgcggaagagggggctgaccattagaaggaaaactaacaaacagaaagtaataatatcaacatcaacagaaaggatgcccaagcaaaaaccccatccaaaggtcaccaacatcaaagaccaaaggtagataaatccgcaaagatgaggataaaccagcacaaaaaggctaaaaattccaaaaatcagaatacctcttctcctccaaaggatcacaacaagggaacaaaactggacagagaacgagtttgacaaattgacagaagtagacttcagaaggtgagtaataacaaactcctctaagctaaaggagcatgttctaactcaatgcaaggaagcaaagactcttgataaaaggttacaggaactgctaacttgaataaccagtttagagaagaacatgaataatctgatggagctgaaaaacacagcatgagaacttcatgaaacgtatacaagtatcaatagctgaatcgatcaagtggaagaaaggatattagagattgaagatgaacttaatgaaataaagtgtgaatacaagattagagaaaaaagaatgaaaggaatcaacaaagcctccaagaaatatgggactatgtgaaaagaccaaacctatgtttgattggtgtaccttaatgtgataggggagaatgggaccaagttggaaaacacacttcaggatattatccaggagaacttccccaacctagcaagacagaccaacattgaaattcaggaaatacagagaacaccactaagatactccttgagaagagcaaccccaagacacataactgtcagattcaccaaggttgaaatgaaagaaaaaatgttaagggcagccagagagaaaggtcgggttacccacaaagggaagcccattagactaacagtaaatctatctgcagaaaccctacaagccagaagagagtgggggctaatattcaacattcttaaagaaaagaattttcaacccagaatttcatatctgaccaaactaagcttcataagtgaaggagaaataaaatcctctacagagaagcaaatgctgagggattttgtcaccaccaggactgccttacaggagctcctgaaggaaacactaaatatggaaaggaaaaaccagtactacccacggcaaaaacaaaccaaaatgtaaataccattgacacaatgaagaaattgcctcaactaatgggcaaaataaccagctaacatcatatgacatgctcaaattcacacataacaatattaaccttaaatgtaaatggggtgaatgccccaattaaaagacatagattgcaaattggataaaaagtcaagaaccattggtgtgctgtattcaggaggcccatctcacgtgcaaagacacacataggctcaaaataaagggatggagaaagatttaccaagcaaatggaaagcaaagaaaagcaggggttgcaatcctagtctctgataaaacagactttaagccagcaaggatcaaaaaaggcaaaaaaaggcattacataatggtaaagggatcaattcaacaggaagagctaactatcccaaatatatatgcacccaatacaggagcacccagattcataaaacaagttcttagataactaagaagagatttagactcccacacagtaatggtggaagactttaacatcccactgtcagtattagacagatcaaagagacagaaaattaacaaggatatttaggacttgaattcagctctggaccaagcagacctaatagacatctacagaactctccaccccaaatcaacagaatatacattcttctcagcaccacatagcacttattctaaaattgaccacataattagaagtaaaacactcctcagcaaatacaagagaacggaaatcatatcaaacagtctctcagaccacagtgcaatcaaattagaactcaggattaagaaactcactcaaaaccgcacaactacatggaaactgaacaatctgctcctgagtgactactgggtaaataacaaaattaaggcagaaataaataagttctttgaaaccaatgagaacaaagacacaaggtaccagaatctctgggatacagataaagcagtgtttagagggaaattgtagcactaaatgcccacatgagaaagtgggaaagatctaaaattgacaccctaacatcacaattaaaagaactagagaagcaagagcaaacacattcaaaagctagtggaagacaagaaataactaagaccagagcagaactgaaggagatagagacatgaaaaacccttcaaaaaatcaatgaatccaggagctggttttttaaaaagattaacaaaatagatagaccactatccagactaataaagaagaaaagagagaagaatcaaacaaacacaataaaaaatgataaaggggatatcgccactgatcccacagaaatacaaactaccatcagagaatactataaacacctctatgcaaatacagtagaaaatctggaagaaatagataaattcctggacacatacaccctcccaagactaaatcatgaagaagtcaaatccctgaatagaccaataacaagttctgaaattgaggcagtaattaatagcctaccaaccaaaaaaaaaaatagaccaataacaagttctgaaattgagacaggcagtaatagcctaccaaccaacaaaagcccagcaccagatggattcacagccaaattctaccaaaggtacaaagacgagctggtaccattccttctgaaactattacaaacactagaaaaagagggacacctctctaactcattttatgaggccagcatcatcctgatacaaaaacctcgcagagacacaacaagaaaataatatttcaggccaatatccctgataaacattgatgcaaaaatcctcaataaaatactggcaaactgaatccagcagcacataaaaagagcttatccaccatgatcaagtcagattcacccctgggatgcaaggctgtttcaacatatgcaaatcaataaacgtaatccatcacataaacagaaccagtgagaaaaaacacatgattatctcaatagatgcggaaaaggcctttgataaaattcaacacaacttcatgctaaaaacactccataaactaggtactgatggaacatatctcaaaataataagagctgtttatgacaaactcacagccagtatcataatgaatgggcaaaagctggaaacactccctttgaaaaccgtcagaagacaaggatgccctctgtcaccactcctattcaacatagtattggaaattctggtcagggaaatcagcaagagaaagaaaaaaggggtatttatataagaagagaggaagtcaaattgtctctgtttgcagatgacatgaattgtatatttagaaaatcccattgtctaatccccaaaactccttgataaacaacttcagcaaagtctcaggatacaaaatccatgtgcaaaaatcacaagcacatctatacaccaataatagacaaacagagccaaatcataagtgaattccccttcacaattgctacaaagagaataaaatacctaggaatacaacttacaagggatgtgaatgacctcttcaaggagaactacaatccactgctcaaagaaataagagatgacacaaacaaatggaagaacattccatgctcatggatagagagaatcaatatcgtgaaaatggccatactgcccaaagtagtgtatagcttcaatgctattcccatcaagctaccattgactttcttcacagaattagaaaaaactactttaaatttcatatggaaacaaaaaagatcccacatagccaagacaatcctaagcaaaatgaacaaagctggagacatcatgctgcctgacttcaaactatactacaagcctacagtaaccaaaagagcatggtactggtaccaaaacagatacgtagacgaatggaacagagcagaggcctcagaaataacactacacatctacaaccatctgatctttgacatatgcaggaaactgaaactggaccgcttctttacactttatacaaaaattaactcaagacggattaaagacttgaacataagaactaaaatcacaaaacccttagaagaaaacctagacaatatcattcaggacacaggcatgggcaaagacttcatgactaaaacaccaaaagtaatggcaacaaaagccaaaattgacaaataggatctaattaaactaaaagcttctgcacagcaaaagaaactatcagcaaaattaacaggcaacctacagaatgggagaaaatttttacaatctatccatctgacaaagggctaatatccagaatccacaaagaacttaaataaatttacaagaaaaaactaaacaacttcatcaaaaagtaggcaaaggatatgaacagacacttctcaaaagaagacaacatttatgcggccaaaaaacatatgaacagacacagagccaaaccatcactggtcattagagacacgcaaatcaaaaccacagtaagatgctatctcatggcagttagaatggtgatcattaaaaagtcaggaaacaacagatgctgaagaggattggagaaataggaatgttttacactgttggtgggaatgtaaattagttcagctattgtggaagacactgtggtgattcctcacagatctagaaccagaaataccatttgacccagcaatcccattattgggtatatacccaaaggattataaatcattttgctataaagacacatgcatacgtatgtttattgcagcattattcaccatagcaatgacttggaaccaacccaaatgcccatcaatgatacactggataaagaaaatgtggcacatatacaccatggaatactatacaaccataaaaaagaatgagttcatgccctttgcagggacatgaaatgaaaccattattctcagcaaaccaacacaggaacagaaaaccaaacacgcttgttttcactcataaatgggagttgaacaatgagaacatatgggcacagagaggggaacatcacacactggagcctgtcaggggtggagggctaggggagggatagcattaggagaaatacctaatgtagatgacgggtagatgggtgcagcaaactaccatgacacatttatacctaagtaacaaaccttcacgttctgcacatgtatcccagaacttaaaggataattttttaaaaataaagaaaaagaaagagctttaattggactcacagtttcacgtggctggggagaatcatggcagaagtcaaggagaagcaagtcacatcttatgtggatggcagcaggcaaaaagagaatgagagccaagagaaacaggtttcctgttatcaaaccatcagatatcatgagacttattcactaccacaagaacagtatgaaagaaaccgcccccgtgactcaattatctctcactgggtccctcccacaacacatgggaattatgggagtatgattcaagatgagaattgggtagggacacagagtcaaaccatattattccaccactggctcctgccaaatctcatgtcctcacatttcaaaactaatcatttcttcccaacagtcccccaaagtcttaactcgttcagtattaactcaagagtccacattccaaagtctcaactgagacaaggcaagtctcttccacctatgagtctgtaaaatcaaaagcagattagctacttcctagatacagtggaggtacaggcattgggtaaacacagccattccaaatgggagaaattggccaaaacaaaggggctacagggcccatgcaagtccaaaatccaggggggcagtcgagtcttaaagctccaaaatgatctcctttgactgcatgtctcacatccaggtaatgctgatgcaaaatacgggtatccatggtcttgggcagccctgcccctgtggcagttccacatggctggagaggcctcagaatcatggcagaagtcaaggagaagcaagtcacatcttatgtggatggcagcaggcaaaaagagaatgagagccaagtgaaacgggtttccccttatcaaaccatcagatctcatgagacttattcactaccatgagaacagtatgggagaaactgccccccaccaggtgcctcccacaacacgtaggaattatgggagtacaattcaggatgagatttgggtggggacacagagccaaaccatatcaccatcaaaataccaccgtcatttttcacagaactagaaaaaacaatctgaaaattcatatggaaccaaaaaagagcccatgtaaccaaagtaagactaagcaaaaagaagaaatctggtggcatcacatcatctgatttcaaactatactataaggccatagtcactaaaacagcattgtactggtataaaagtagacacatagaccaacggaacagaatagagaacccagaaataaacccaaatacttacagccaactgatctttgacaaagcaaacaaaaacaagaagtggagaaaggacaccctattcaacaaatggtgctgggataattggcaagccacatgtaggagaatgaaatgattctcctctctcaccttatacaaaaattaactcaagatggatcaaggacttaaatttaagacctgaaactataaaaattctcaaagataacatcggaaaagcccttctagacatgggcttaggcaaagattttatgaccaagaacccaaaagcaaaggcaacaaaaacaaagataaataggtgggacttaattaaactaaacggcctttgcacagccaaaggaatagttagcagagtaaaaagacaaccccacagagtgagagaaaatcttcacaatctgtacctctgacaaaggattaatatccagaatctacaaggatctcaaacaaattagaaagaaaaaacaaactatcccatcaaaaagtgggctaagaacatgaatagacaattctcaaaagaagatatacaaatggccaatgtgaaaaaatgttcaacattactaatgaccaggcaaatacaagtcaaaaccataatgcaatgccaccttactcccacaagaatggccataatcaaaaaattaaaaaataatagaagttggtgtggatgcagtgaaaagggaacacttcaacactgctggtgggaatgtaaactagtacaaccactatggaaaagagtgtggagattccttaaagaactaaaagtagaaatactatttgatccagcaataccactactgggtgtctgcccagatgaagagaaatcattatgcaaaaaagatacttgcacccacatatttatagcagcaatttccaattgaaaaaatatggaaccagctcaaatgcccatcaatcaatgagtggattaagaaagtatgagatatatctcatattttctttatatatatatatgaatactactcagccataaaagggaatacattcataaattaatggcatttgcagcaacctgaatggaattggtgactattattctaagtgaagtagctcaggaatggaaaaccaacaatcatatgttctcactcataagtaggagttaagctaaggggatgcaaaggcataagaatgatacaatggactttggggacttggaggaaagggtgggaaggggttgaggaatgaaaggctacaaactgggttcagtgtatactgtctgggcgacaggtgcaacaaaatctcacaaatcaccattaaagaacttatccatgtaaccaaataccacctgttcccccaaaaacttatggaaataaaacaagttaaaaaagaaaagaaaaagatgggggaaaaacaagacaaagacaatcaaaataccttaccaacctaaattccagataagaaaattttcaggagtattcttccaaacaagcctcctattctccattcaattgggcaggaatttccccacgccaggactctttctaccacctaggaagagccaaccaagatctgtcaagggggcacaatgcctccacaggggccaccagatcagaaaaagaaaaagggtgttgtttgcctttagaatacttatcaaaagacatcgtccagtcccagaaaatgtttccccactgcaagcaagtccaagtaccatggactgaccatccacccaccagcaaggattgtgccagaggtggccctcagtttaagaaagctcacctccagggccagtgcaccagtgaagggctgccaaaccatggccacgcacctacaggggcaatctcaaatgatgctccaaatctgttacaatccagtgggtttttcttgcccgctgcacagaaaatgccaacacactgagacagaaggtattgcaacagagaatgagcttaataattgcaggaggctcaagcaatgaagacaggagatatttctcaaatctgcctacctgagaatttgaagactagaaattttaagaattgtttggtgggcaggtggctaggaaatggacactactgactggttgggtcagggatgaaaacacagtggtgtgaaaactgtcttgtgtgctgattcagttcctgggtgagggtcacaggaccagttgattcagtttcttggtatgggtcattggtccaaatagtgtcagttgctccaccagaacgaaaagtctgaaaaatatctcaaacaccagtcttttttttttaaatatactttttattatactttaagttctagggtacatgtgcacaacgtgcaggtttgttacatatgtatacatgtgccatgttggtgtgctgcacccattaactcgtcatttacattagatatgtctcctaatactatccctcccccctccccccaccccacaacaagccccggtgtgtgatgctctccttcatgtgtccaggtgttctcgttgttcaattccaacccatgagtgagaacatgcggctcaaacaccagtcttaagtttcacaatagtgatgttatctataggagcaaatggagaaattacaaatattgtgactatcagctgactgactcctgagcaataaacaattattttaaaaagcaagcaaggtagggaatgatgactgcttactgtttaactatgcctacatcttagcagaattcaggccactctgataattctaaccttgtgacattcatccatttttcaaaggtagtttctgttcctgaataaggaagggtaggttaaactataaactaaattcctcccacagttaggctgtcctacatacagaaataagcaaaggcagttagcttgtgaatataaaggcaagatggagtcagttatgcttttttctctcacttttataatatcacgagcatagttttgtgttcagttctctgtcagtggtagtggtcatgacatgggctctggagttaggtacacatagtttctattcccagatccaccaccaatcttggaaagttacttcacctttctgaagatttgtatccttctctgaaataacaagatattgtggttgagaggaataaataaaataacatctgcaaacccactcttattcctgagatcctctttaaaactagcatctacagtggtaacttacagtgattccctcggtttatgtctctctttgtctctgttttcctaaggctgaatgcttccaagtactcacctgaatcctgcctctttagtgaaatcttttccaaccattcctgaaccagctgatcctatccttctataaattatttctcccatatgtcaacatttaattatgtgccattcctcttggtgagacactatagagaggtttaaaggacattggctgtgtgatcattgagggataattgagtaaatttttttttagtgctcactgagtgttagagctgccctctctttttttcagctgttgctagcagcagtcccttctgcaccagcagcatcagaccctggcaggcatgtgaataccttagggattgctcttgtcagggtccttcctgcttctggattttggttccatttgtgtttccttttgcatgttattcaatggcctcttgtgttattgtgaaatacagattgaccgtggcagaatttaactggaggacacccagccagtgtccactgcagtactgattgctcacttggtggtggggaggaacacccacacccatatttggtcaaagaattcttctgtgttgatgatgtggtgtgaaatcagataaaatgggttttagagtttttctaaatattcctccaagggagagattgttgacatttatttatgaaaacctcaagataataactctaaggaagttgagcacagtatcctcttgcttaaaaagcctggtgataggaattgtgttcactttcctaattcatgaaatttaaaatagggtctttcctctcttacttcagaagagatgaaggacaaaagaccagatggggaggacaaggttgtttatggggaagtcatgtacctctgacctggattctacgatgttcattcaatcatacctggaagtgtgcatctttgcatgtgcagtcatatatttctatcacatgactcataattccctccctgtcagtggcaattaggagctcatgtaaagcttaggacagtaaaattatatggtgtgttcttccactgcaacaaggtttctctgaggtttaaggaaacaataggacaagagggctggacactttacctggtgtcctgccttctttttttattgagcagcagtctactcacccatcatttttgaccttcctgttttcctaccatgggttcagatataattactgatgtccagatacaattacttgtgcctggagcttgatgttattttttaaaagagaggcctgaggaatggtttcctagctgatttccaggattctaattttcactgtctaagtcgttggttttcaaccctggctactggttagagtcaccttaggaatttaaaacatacaaatgcctgtgtcttcctcaaagagagtctaatttgattgctccatggtgtgccttgggatttggtcatttaaaaatgcttccaaggaaaatagtcattttacagtggaggaactttagcccagtgctcaaagttaacatccccaataatcaaagatatagaaattctgggcatcctaatatgatggatggagaaggtgcagcatcgcctctgtggcatttttgcccaaagtggataacctgagtttaattatgagaaaatattaggtaagcccaaactgagggtcattccaccaaataactcaccgatactctttaaaaatgttaaggtcatgaaggcaaaagtaattctgaggaaccatcccagattgaaggcgattgagaggacagaataatgagatgcagtgtgtgatcttgtatggatccttgtccagaaaaaggatattagtgggaagatggagaggatttgaatagggtctgcaagttcattcattgtaagatgtcagtgatcatttactgatgttgatgattacactgtggttatctataacgttaatattagggaaagttgaacgaaaagaatatggggactctgactatttttggaacatttttggaagtgtaagattatttcaaaatgaaagttataaaaaagaagggggaaaaaacttccagataatcctgagttcccagagttgaagaccacttgcctaagttatcttgcctaatactgtcagagtaatcttcctggaaatgctttttgtgatgttactgaccttctcaaagctttccagtgactcttatcatctataggatgaaattccaatttcttaagccatcattcaaagtctccataatatgaccccaatctactcccttgatccacatttgactttctcatgtctaaatattttgcaattatttgactccttcatataacatgcatacctgcctgttcacctcctaaattgttcttcatcctaaggcttatttcagtccctgtctcttcattgaagcttgtatggttatttctgttagaagccgtcatcctttgtttctttgaattctggaaggtacaatggtgtggactgaaacataagctttggattcagaaatatgtgagtctgaattctggttccacctttcaccaattctgagataaaagacaagttagtgatgtcttgggatagagggataatagtacctacttaaagggtcattgtgagcattagatgaggtgcaaacacaaaggtctccagcacataacagatttcttcctcatcatttttgctgctcaatggtccccaaaggtattatgggtgatgcaaaggcttttatcaaaattttctgcagcaccttttaaaaagtcttgtgcctggccatcactaagatgagagacacccttgaactgaactgaatgtatgggactttaaaaaactcaaccgagatttgtttttcctggaacacaactcagtaaacaagtggatagaaaaatgtaacccaacagagggagaagggaagcgcaatggtttcatataacagccatgccttcttaggaaaaagctgtgatgccttctgagagtttgctctcagtcaggcaggatcaaagaagtacaactccttagtacaatcccttaaaccgtgagtcctgcacagcacctcactaatccattccctgcccaggtgatgtgtgcataggtgaagagtcagatctccataagtcagacactcttcccccttttcagctccctgaccctcactactgtgtgctctggtctggccccagctgccaggccattagtattggtctaagaaagcaagaccaggacgggcagctgagaggaaagtcagaggccaccaagcatgaaaagagagagatgaggctgtcattgctcaaagtcacccactctgggtgtgttttatgactgtttctggattttggaatattctcccctttgtgatcattccagggactcaccctcctcctatttccttctcattgcactttctgtccccagtgcaccctttttatggccagagactggctgtatgactagatgacaattcagtgaaagttacttgttgtgaggactgagagccaggcccaccctgctttttcccagaagagactggaggttcataaaagccagctttaatgcagggctgtgcaggtgtgagtgtggtgttagggaacaggtgcaaaagtgaagagtgagacagaaaaaaaagatgctggctgttcatcaaatcctgaaagtagagggagcaaaaattattctggaaggtggatgtcattcaggagaccttggaagacctagagtgtcctctgcacaaataaagtggaggatggggttaaattacggagttggatgacactcattacctgacttcacttctctgcctcagttttttaaatctgtaaaaatggggatgctgacactcaggattttttatgaggactgtagctacctgaaaaccccttaggatagtgcctggtgagtagtgagtgctgcgtcagtgtgagctattatagttatggaaataggcaaaggtgccatcaggagcattcagagtgaggaggtgccttccagtcagggtcctcgcaggcagctggagatgaagatggttaagggggcttaaactccacagtggaaggattgaggagcagtcctgagaaggaattcagaagccaacaggcatggaaagaggccagggggactgtcattgctcaaaggccacacactgtgggtgtgctttatgactgttactggctttgaaatcttctcccctttgtgaccattccagggactcgccctcttcatatgtttctggatttggaatcttgagcaatattcatgacgtacaacattctgtgaaaaatacctttacccgacagcaggaacagccagagtgggtgtggcttctgtcacaaatattgtctcctaggagtctaggaatgtgtcctaagatcgaatggttttgctgaaagccaagcctagaaatgggcttcaggggcaccttgtgaatagcatttatgttgccaatggaaagcattcatctttttaaaggaaagcattcatcttaatgaagaaatcccatcttatggtctgggtcagtattttttgcctctgtactatccttatttataaattgaaaagagaaagaccgaagaagagtgacataaggaagcacatgtatgaattaacaggacagaaatgggactagtatgtgtaaattaagggaaagcatgtatatattttatgtgaacataaaaaggacttcttgttggccggcgtggtggctcacgcctgtaatcccaacactttgggaggcagagacaggcggatcacgaggtcaggaaatcaagaccatcctggctaacacggtgaaaccccgtctctactaaaaatacaaaaaattagccgggcgtggtggtgggcgcctgtagtcccagctactcaggaggctgaggcaggagaatggcgtgaacccgggaggcggagcttgcagtgagcggaaatcgtgccactgcactccagcctgggcgacagagcgagactccgtctcaaaaagaaaaaaaaaaaagaaaaagacttcctgttttaaacagacttctgtgtaaaaataaaaataatatacactgccttgagtggagagcagactgcaggaccaaaacattccagcagagtcatgagagaatgggttgtgtggcttctttgctaaatagtaggttaaactgagtatgttactgaagagaaaggagatgaaggagaagataggtgagggtgagagaatgtgagatggcaaaaggaaaagactgaaagaaaggtttactaagggctcatcaggtaccaggctttatgtctaatgccttccacatattaacgtacccattcaaactgtcattttctgatgcagtaagagtgactcttgtgctgcagatgagaagaggctgaagtgggtgaagtgagtggtccagagtcatccagccagttcatagcagagctagtgtgtttcacctcgaagtttgtgctctttgtgattcagacagaaaagtgagacacagaaggaaggcaaagcaatttttgttgtgggtaaagtttacagaagttacctgtattaggcagaataatggcctcctaaaaatgtccacatcctaatccctggaacctgtgcatgctactttatttggcaaaagaaaagactttgcaggtgagatgaagttaagtttcttgagatgcgaggttattctggataatttgggtgggctcagtgtagtcagaagggtccttgtaagtgaaagagagaggcggaagggtcagggtgagaatgatgcagccagagagactccactggccatcgctggctgtaaacatgcatcaaaagacaaaattataacaaattcagttatagatacaattggcttttatttgtgattcatgagtcagggcagtttccattctgcaaaatatagtgatagctcctactgggcaatacaacagtagaacagtgggttttgtaaaatgggaatccaggaacagaagaatataaataaattgatttaaataaactgattggttaatttcagaatacttcatattacttttttctaagagttaaagcagaaaggactttcttactgtgctgactcagacagcctggactctcatgtttttaggaaaattttgtctgttctgggatctacctgcttcctcatgtttcagtgtgagtatatggcatttagcatgactggctccattctggagtcaccaggctgtcacctaaatgagagtttgactaaacataaggcattaacactactgtcagttaccatcattttggacttccatcattcataggttatgatgtcctcctaatcatacatttatttgagtttttgtcattccagccaaagagagaatatttgacatttgacgaatggctgcatgcaaacatttaaaggttttagagaatacagcacaccagggtaactaatattgtgacaatcaggaggatcacaccaagagtttgaagtatgatccataggcagagaccccatgaaccaaaccaaataaaagagaatagattaaagaatgagccacatgagaagcctacccattttaatcaagcagcatatttgttaatttttgcaactgagtctctatagtacccactgtatttatttatgtgcaacaagaagtgtcagcaactgcacaaactcctccctgttcagctagtaggcagcaattctgttatctggcatcccatagctgggttaaattaaaacagggcgtgagaacaggtgagtctagaggtctaactctaacagggaccaccgtgcatttgaataaacagttgtattagggatgttgttaaagttagccactgggcagaataaaggatcccttaggtcaaatatttgggtttgacatgatgacatgacacatccaacactctgtcaaattacctgcacaaggcgctgattgtgaaattctagttacagcattatcttaccaaattaaagaggcaggcatgagcagggaaaaatggagtgggataagagcctcgtcacgatgaggcttgggacatcttgggaaaaactgtccacagcatgaagtcatcaacttcttgtcctggttggcaatttgagtgtctctagttatggtgttgaacattttggttagctctgagtggcccacatctcaggcatgagggtttttccttgaaatttacattgagttgtccacctccagcttataggtcttcaggaagagagcaggtcttatacttagtgatgccacaggagaaaatgggattgaaggagctagaagaatccagtccagtctgcaggtggataataaaaacttgaaaacaaaatacagggctacaatttgataacagttgtattatagtctttcctctgaacataatttttctctatctctccctgtttctaccaaagttaatcagagtaagactaatctgtttacaaaataggtagagtctcatcaaacttggtctgattctttatataagaagtatagcaagaatagcgattgaccacatagcatctttttaagattgctttgctggaaggtttgataaggaatctcagattaaacttttagaaacctctcagcactaggaagccaaaccaaggctgacttcagactttgcctgcagtacctcagtacctacgggttcattctatgtatatttccaaatatgacatcccagccaaagccttggtaatataaccagtatttttaaatgtatcctgttataaacagaacagattcttattgaacttatgcaaataactattttcataacaatgtgaacacccatgaatagttgcctgattctggatggaaaatgtagggagaaaaattaatgtttcaatttttgttcacaagttgtattttaccaagtttctgtaagctatagatagcttaaaagaaaaatattccttcaaatttggaaaacaaaacatttaaagaatcatcaaaacttcaactaaaaattcataaaaacattatcctcattagttcatctagtcccatgaaattaattttttgttctgcctgatcttgattggcagtttcatgaagatatctcttcattaaagttttggaaattcttagcccaatggtatgattctaaagttatcagaaacttgtattcaagacaacttgtcagagtcttagccataaatctccttggaaaacaagcagttttggactgtaaccatttccaagtgcttttagagaagaatcaaaacaactgtctgtgaatgacaaagacttaagatggcaatggttaaaaatctgataagacttcagatttgatagatttgatgataatgacaccactcacaaacaaatttggttatttctgtggcatgtaacactatgactgacaaaatattagatttctagaaatctcatataatttttgaaacattcacatcaataacatacccgcaaatataacttagagaaggtttggcatcacttgtcatttgacagtgttttccatataatttaacatatcaattaaggtgaatttccatctcgcttctgtttctcaactggattactgagttcagggcatagtacattaacaaatatggccaacaatgtataagcttatgtatgttgaaaaagttccccaggtaattttgatacatacccctagctacaaaccattgatttaagcccaagtcctgcttatcagagcaggggttctgcatcctgcttgcacattagtagcatgtgggaaggcttaaataataacgccttggtcccactctagaccattaaatcaaaatgtatgagcagagcctggaaatcagttgttcttttaaaaattttccagtgattccagtgtgtagccatatttcccattagatttctctttcttcttgtggaatttatctttttctattttggtattacaattatttttcatgtcttattttttggagacagggtcttgctctgtggcccaagttggagtgcagaggcacaatcatagctcactccaaccttgaactcttgggctcagaggatcctcccacctcagcttcccaaagcactgggatgacagttgtgagccaatgcacctggccctttgtcttatcgtctgtcttaggctttatgttccctggagtagggaccttgccttcttcatttctgtatctttcatgaacacatgaattggttatcaggaaaagattctcagccacgtttaggttgtgtcctgagtctcaggttcacatactaatgctaccgtctttgtcctccacaaggacagaggttgcttgtgatgaagggtgtgggtaactccacaatgcaggtggtggaggaaggttaccttgtttttagatataacattggaactaagaattctatgtgtacatggggtggaagggcaggatgtataggaagacagatctaattaggatggagaaattatactcaggagtagtggtaaaggaagtaaaaaggattcatgaagagaagaaatgtgaacttatctaatgggctagagtaggccgctgcaggttcttcagtaggtgattttaggaaggtaatgaagtagtcatatgctaggaagcattcagactagagaaaagaagtcaagcaggacttcaagcagttgttgaggtttatgggaatggagagaacagcacaagtgaaagatgttttaaaaaggaccaagaagctttcacaatgtattgaattggggaaacaaatgagcagaggctgggagtagtcatgtctaagagacagtggagtacaggaagcatgaagaccagggaagaagagacctgcaggaattagtgcttagaagcaggagtttagtgggaggaggaggagatctagtcccagatacaggtgaagaagtcctttccctctcccaagcatggcagtcagccctgcaggaaataggataagaggaaaggtcataatacctaccactcttcccgaaatgcagaaactacaccaaggctgctatatcagagccatcccagccagtactccaatcatgatgctgacagcggtcccagctgagaggtcaggtgaacttgcttgtactgactcatctgccatggaaagaaaagagaaggaatgaagttgatcttattttacagggaagtcccccaggaaccaactctcagcatgaagtcgtttctatttgttccttcaaggaatacattatttttgtgggaaggttgctgggagatgattatccaactaaattcttgcaggttttttatctcaccaggtttccaggttgatggtcagtcttctgtcaattccatcctgacctttttacactcagatatttttgaaggctttgaaatttgagaaagactgattgctaatcttgtatgtcattaaaacttcccactttttcatggttgcattttttttcttagtgtctcagttgtggcagttagtgcattttgaattcaccacctcctttgcacagagacctcacttcccatgggctcccagcaggtgtgtgaaagcaagtcaagttctgcaagactattttgctctgaaaggtgatgggcttgaggaattcccaacagtcttgcagaaactctcttcgaactgcactgcaatctaaaactttcttttttttctctttctcctccacaggcatcacatctgcatcatgatctgagggctctcccaggctcctccccctcccagcccactttccctcacaggtgtttttccctcaaaattatattgcatgtctaatcccatcttgactgcatctctctgaatgaaaactaacatactaggcttgagacttcatatttaactctgttcttttccctctcccatattaatcagtaaccatgtcccagtggactttttgtgtaatgcctgtttctcccatgtatatgtatatgtatatgtatatgtatatgtatatgtatatgtatatgtatatgtgtgtatatatgtgaatatatatatgcacatgtatatataataccttctgcatctgtttcttctttatttctgttgcaataatttgggcttaatttctcatcagtcatcagtcaactcagactgatgattaataatcactaatattagctactgttgaggggtgcttcctatgtgtcaggccctgtgttaaattatttacatgtatctcatttgagctgtaaaataatactgtcaggtagaaaatagaggtggcttagagtggtgaaaaaacttacccaatgtcatacagctagtgacaggcggatctaggatttgcctctaagactacctgacttcaaggctaataataatggtagctttaacagcagctaacatttatgaaacagttcctctgcatgtggcattttgctgaatgtttcattgattattacattaaatcttcaaaacaatactgtgaaacaggcactcttattgcaattttcagttgtggaaactaaggctcagagaagttaagaatcttgtgcaagaaatgtataactataaatacatacatttaaaaagaagaaagatctgaaatcaacaacctggctttacaacttaaggatataggagaaaaacaaatgaaacccaaagttagccaatgaaggaaataataaagattagagtggactagaaaaacaatagagaaaagcaatgaaaccaaaaggtggttcttcaaaaaagttcaacaaaattcaaaacctttaattagatcgactaagaaaaaaaatgagaagatagaaattactcaaatcagaaatgaaagtgattactaccaattttacagaaatagtaagtgttatgagtattatgaataattatatgccaacaagttagagaacctggatgaaataaattcccagaaacataaaaccttccaaatggaaccatgaagaaacagaaaatctgaatagactaataactactagggagactgaaccaataaaacatttgtcaaaattcaacattctatcatagtaaacacactcagattataaatagaaggaaactacctcaaatataataaaggcattatctgaaaagcccaacgctaacatcatactccagggagaaagactgaaagctttccctctaagataaaaacaagacaagaatgcctagttttaccacttctattctatgtagtattgaaagttctagtaagagaaagtaggcaagaagaaagaaaataacatccaaatcagaaagaagtaaaattaactttgcagatgacaggaacttacatgtagaaaaccctagagattaaaacaaaattttagaactaataaacagattcagtataactgcaagatactaaatcaacatgcaaaaatcagttgaaatcagctgtatttcttttttcttttttctctgtctctttctctctctctctcttttttttttttttttttgagacagagtctcattttattgcccaagctgaagtgcagtagcatgatctcggctcactgcaacctctgcctccccagttcaaatgattctcctgcctcagcctcccaagtagttgaaattacaggcgtgtgccaccacacctggctaatttttttttttttttttttttttttttttttagtagagacagggtttcaccatattggtcaggctggtctcgaacttgtgaccccaaatgatctgaccacctcagcctcccaaagtgctgggattacatgtgtaagccgttgcatccagccaaaaaacagttgtattcctatgcacttacaatgaacaatctgaaaagaaattaagaaaaaaattgattcacattatcatcaaaaagaataaagttcttaggaatatacttaaccaaggaggtgaaaaaattgtaagctgaaaattataaaatgcagctgaaagaaattaaagaatatattaataaatggaaagaaattccattttcatagattggaagacctaatatcattaagatgataatattaatgcaatccctaccagaatcccagtggcatattttgcagaaatagaaaaatcctaaaattcatatagagtctcaggactctaaatagccaaacaatatgaaagaatgaagatggaggactcacacttcctgatttcagaatttactacaaagccacagtaatcaacacagtgtggtactggcataaaggaatacatagaaaccaatggaatagaatggagagcccagaaacaaatgcttgcgtttatagtcaaattatttttgacaagggtaccaagaccattcaatagggaaaggatggtcttttcaacaaatgatattgggacagctggatatccatgaagaaggatgagttgaatctttacttaacaccatataaaaattaacaccatataaaaattaacccaaaatggatcaaagacctaaatctaagagataaacctataaaactcttagaagaaaacatagggggagagcttcatgacattggatttcacaatgatttcttggctatgacacccaaagcacaggcaacaaaaaaaaaacagacaaatttgacttcataaaaaataagatcttctctacatcaaaggacattatccagaaagtgaaaaggcaacccatggaatgggagaaaatatttgcaaatcatatatctgataagggattaattctcagaatatataaagaactaatataactcaacagcaaaaacccagaaacccaatttaaaaatgggcaaaggactaaaacagagatttctccaaggaagatatgcaaatggccaataagcacatgcaaagatgctaaacatcactaatacttagagatatgcaaatcagaaccacagtgatacaccaccacacacatgttaggatggctttgatttaaagaaaaaaaagaaaacacaaaacatgtattttgaggaggtgggaaaattgaaactctcgtgcattgccggtgggagtgtgaaatggtgcagccacagtggaaaatggtagagccgtttctcaaaaaaattaagcaaagcattaccatttgatgcagcaattccacttctggtcatatgcccaaaataatggagagtagggctttgaaaagatatttatacacccatgttgatagtagcattactcacaatagccaaaatgtggaaacagctcaaaagtccaccgaacgataagtcaagaggcaaaatgaaatatatccacacaatggaaactcattcagtcttaacaggtaataaaataaaataaaatgccgagcatttacacactcatgagactcaaattctgatacatactacaacgtgaatgaaccttaaagacgttatgctaagtgaaatgtggccagacacaaaaggacaaattttgtatgagtctattgatgtgaggtacttattaataaaatagtcaattacagacagacagaaagtagaatgatggctaccagggactagggttagaaggagtggagagttactgtttattgagtgcagaggtttagcatggtgagttgaaaaagttctggaaatggatagcggtgatggttgcacaacagtataaatataattgatatcactaaaccatactttttttggagacagggtctcactctgtcaccgaggctggaattcaatggcgcaatcaaggctcactggagcctcgacattctgggctgaagtggtcctcccgcctcagcccaccaagtagttggaactacaggccatgtgccaccatgtttcgctaattttttgggaagacagtgtttcaccatgttgtgcaggctggtattgaactcctgagctcaagcgagccacccatctcaacctctcgaagtgctggaattacaggaatcagccaccgcgcccagccctaaaccgtatatgtaaaatggctaatatggtaaatttcaggttatgagtgcttaacctttatgaatatatagtggctggtactcttatcctcgctataaatacacactttgtggccctgccccttccctcccttgcagagtcccggtggctgaatctccctatttgtccaaatgttcatccctagctgtgctctgtgctgtgtccacagcgtcatacagcgggtgacttcagagccaggccacagttcaagagtctgccccagggctccctctcttcccagttccctgaagcctgacccaggagaggctctgccattgattgacagctcaatttagccagattcaggacaggtcgcccaagcaccttctccacacacccaggtcccaccccaggtggagtcagggcagggccagtcaccaggtgagccggaagcagagcagggagcagactctgagctgctcctccctcgtccaaggggtttcctcctctcatctggggaaaaagtgtgagatgtttcaaagcttccttcttccttgtagctcatgaattaggcaaaagaacacaaagaggtgacaaaaagggacgtattgatgaccgagagaacccttaaggacccttcctgcttttccctctgtgaagctctttccactacctggggctttggggctgagggagccccctccccacattccaggctggatccataatcagccatgagaaattactgaagtacagggaggagggtctgcagagacagagtgagagggttcagcggggagaatttgggatctgcttgtgcccatgggacacaggctggaaaagaaaagttttttcagctcttccttaacaccagagagaccccatctcaaaatatgatgccaacggtccagggatccatgtaccacggactgtgatcatcttgactgtggtactattgcggtcagtggccaatttgtgggcatagcaggtataggatacactattctttgcagtgctttggggataaagagctcttgcatgtgttgcagaaggtttccattactcagccaaaaatacggagagggtgggttagaggccacatggatgaagagtctaaggtttgctcctaactcgtaagatataactggggtagaaggggtgtccaagccacccggagcaaagagaataaagccgtaagtgatgtcctcagagggaagcggaagctcctggtctgtggaagggctgcactgtccctcttacccaaatcacaatcctgaagtcccaaccaaaccccgatgtgttcactgagcctgagacattcacctgtttctcccatcacaggctgtggaccctgagcctcccaggacaggagcagcccctcctctcatattcttggtcaaggctgggtctgcccaggtttgcttgtggcagaaagtcatggccagcctgggtgcctagaggtgagggtctgtgtacttggacctgagagggactaagaggcctggtctctggctgcatggatttgggctgtcagcctgggccacagaggaacagaagatactcacagcggacattcagggtgactgggtcactgcggctggcacccactgggttctgtatttcacattcatagggtcctatgtcattctttgtggcgctgagtagaacgagggtcctgttgtcagtggagagcagcagcctgggactgaccaggaggctctgattgtttacccaccacaggtaggttgtgttctgagtctcaggttgacaggttaaaaccacaatatctttgttctccaccggattgaagttgttgctggtgatggagggcttgggtggctccgctgtgcagataagagagagaaaagattgccctgtgtggccccttggttcccccacggacatctttcaatcagagttggcatctcccacctctaagcccactcaagtccttaaaagcccacagaaggtgtgtgtatcacaagacagatgcacaatgatctgagagctcagacactgtgaggctgcctgatttgtcttagagaagcacagactttctcaagtgtaaattgtgcagcagcgttggcccatggacagacccaggaccatcaatcacagccactggtgcctctcctggtcctttcctgatggctgcctacctggccctttggggtcctcacctcgaatgggcaggagctgagttccttccagctgaacactcctacaccacccagccaaggggtgtttctctgagccttttttttccaaggatatcccagagatgggtgatgataacaatgggtgtttgagcagacatagcagaggagaccaggaaaaagtctagaggtgagtttagtactcagactgcagggcctccaggtggggcagctctacccgggtgtttgatggtgactgacaagagctagtgaccgccaggaaagtgcagcagagtccagaagaagatagagaaagggtgagtgagacaagcaggggctggctgaaaatctgaggattctcaatgacataacaagaacaatgaagacaaattaggagaagagatgtgtgttatgttaggaaatttacaaagagctccctgtccccagctcctgtgcagtcagcaaaatggaggaaatcccaacacaggcatgagaaatgctttcttccttttctctcgacctacggaaacacaacaagagtttgatcaaattcatctaaactaggcagagtctaagtgagatgccagtggctggtgcagttcccattccaagggaccccaccttatgacaatggtgtcatcatgaggacacaggtgtatgcggaatggacagcaaacccatcagacagcacctgcctaggccgctgcacctggaggaggtcccaggaatgactggaggaccttagccccacagcgagacgaggatggagttggtagtaaaatgggtggaatgaacccatgggctttggggactgcacacctgtcctgcctctggccccctggtgagtcagtgtagagagcagatagaggagttgctcatccctgtcccatggccaagcatttacacagtcatgagactcaacacctgggtggcttcttttttttttaagatccagggatcttgctatgttgcccaggctggtcttgaactcctgggctcaagacaccctcctgtctcagtctcccactggggtggctttaggggcaggggatgagagaggtggaacatgggtctcagtcccttggagggacagggaacaggtgccagagcctcctaggatcctgcatcaggttccagtctctgaagagattatggatcattcattccttcattcattccctccctccttcatgagagaactactgagcgagtgtgtttctcactttgggccctggcatgtgcagggtgtgagtggggagagaaagcaaagtcttctcctttatcctcctgtgggagtgacaccaacacatcaggaaacacaggatttcaggtccagtgagggtaggagtgtgaatctaagggagaggcctggacattcccagcactgactctgatagttgaggcaagagattcagttctaggtaaaaactaattctctatttgttcctcactccctagaccagaatctcccacttctggcttggatgcctaggaagcaagctctgtggctacaaagacctggggactctgatgtgactgtccggtccgtgagaccctgcctcagtggctgtatttccttctgcctcagtttcctttaacaaaatgagataaagcgtaaatggtctctggcttgccttgctgtctgtgaatttaccttaaaataatcacaattacctggatgagagccctgtgtagaagagctgcccaaacaagcaggatctctgattgtttgcctccaggagtgggttatttggacctgattcctggtgtacaaagaacttacagcagaaactttcttcttctttttctccccctgaggacactgactcccctaggacctctcttaagttcctcatccagggggactgaggtcctagtaatcctgttcatctgtcctctccaggctgagtctcaggtgaaggatgaggctctgtccttgcccagatgaggccctgggggtgaccaggctggtgaccagctccatgagccatgatcctcaaacagctcaaatccttgctctcagtcagttcagcccaggaggccacaacccagccctgacacaggttccttagggtcacctggagtcaagagccctgggacagggatctgggacttgtgcttccagggctgagcttctctgtgaggattccaggggactcctcaggccaggctctgacccagttctccagggtctttttcagggggagggcacagaatcttggctgagactgatctccccctgctgagtgccccccatcagactgtccttcctctgcagcaagtatctgcagggtctggatgcaggaaagggattctggtctgtagaagtttgtctcccccatgtgtgtccttcactaaatgcccaaactccaacactggataaaatgtagatggggacacaggcacaacccaggcctgacaaccccgtgtgtatgaagtagaactggcccccagcacccagaagtcatggaggtatcactcacagaatacgtagaattgtctggttacttcttcattcacaagattttcttttataacgtgtagggtatagattcctgcgtcattgtgggtgacgttctggatcagcagggttccattggggtatattgtctctcgaccgttgtgtgcgggccctggggcattttcttgacttatattttttacatatcctataattcgatagttggcatgcaccctttcccctttgtaccagttgtagccataaagattctgggactcattatggactactagaaggacctccttcccttctgcgacattgaacggcacgacatcaatattggtctgggcactgtttggcaggttccagaaggttaaaagcgaggctaggagggggagagaacatcagtcaatattgggacctatgtattggggtggaaagatggggccctggatcctgagcaggtctcttcacccacccccatcttgaagtaagtgtgtgtgtgtgtgtgtgtgtcctactggatcaatgtcagcagcatgtcccctatcagcacctctgaccttacatttccctgttcggaatcctcttccccagggatctgcagggctccctccatactgctggacctgcttacatcagggcatccttgggagaccccttccctgacaccttctctagaagccctgggtgttccgtttctgacatttccctgctctgttccctttagagctcttgtcaacacctggcttcacattctagatctctttgcctgtctgtcttctgccgcatgagagcgtgagctctgtgagggcagggacttgtgtgaactggattgcaccccagtgcctggaacaggctgcaggctccagtagatgagttcatgagagttcccagggccctccctccacatcctggggtttattttccaatgcctgaggttggtggctagggacaatgttttatgccctggttatgtttttatttgaagcgtcacatgatatagttattattatcatatttcaaaatgtagcagctagtgatgattaaccaggaaaagagaacatgtgagattttcttgaccctttccaattccagtccaatgtgattttcctgttctggtttcctgtccctgtctggtgtcctctcccaaaggacttcaacagaagccctttgtcccctctcagagccccgtcctcccaaggagaccccagccagtctctctggccctcctcccacccactcccaggaagtcctcccctcacctgtgagcaggagcccctgccagggaatgcacactctgtatggacaggctgaaggggaccccatggtctctgctgcctgcttgtcctctgtggagaagagcttgggctccaggaactctcttgtcagggctgctgtgactgtcagctctgctgtccttcctacctctgtgctgagcctcctcccagggcaggagcactttccaagatcacatggtccaggggtggggtctctgctcaggagtcctctgtcccctcccctctcattcctgcctcttttgtccctcttcctctttcccttttgtctatattcagttcccgatacaaagctttgagtagcaaggctgatggacccctgtcccctgggaggacaaccaacctttcccagtgctgacctatgctgtgttctggccttgggtctgtcacaccagggggattatttcccttgtgacagagaaacccagctgggccttgggtttctgctgggatgatgcccagcaggaaggtgacagaggtggctctgggggatagaaaggggctcactgggggatgactggggagggaccagccctctgtctccagtgacccaggcacagaaaccaaggcccaggggtctcaggaggagctacagctcctgggtgtggagggaggtgtctggtgtgtcctgggaagagagctgtggtggagggaggtgtgtggctctgagctctgctgtccttggggaaggcttcaaggaaaccctccctctccctgtcttttggatgtgctgtggctcaggtcctttccatgttctacctgacctggaagcctctgtctggctgacagtcctgtggtcaccccgccttccccatgggtggtgccaggagggaatggggagctgcacagaaacccctggcagagcggggtcttcaaaggccccaggaaggaagaggtgggacacagcaggaacgcgtgaaagacaagaagggtctgttggagcaaggaatggaaaccaggctccaccttcaccaccttagcaaggccaagttcatgtccaggggaattacagctgaccttcgaacacacagatttgaacacacaggtccacttacatgtcgatgtttttttgtttgtttgtttgtttgtttgatttttgttttttgttttttgtttgtttgttttttgcttttttttttttcctgagacagagtctcactctgttgcccatgctagagtgcagtggcacgatctcagctcactacaacctccacctcccgggttcaagtgattctcctgcctcagcctcccaagtagctgggactataggcacccgccaccacgcctggttaatttttgtatttttagtagaggcggggtttcaccatgttggccaggctggtctcagactcctgacttcaaatgatccacccacctcagcctcccaaagtgctgagattacaagcatgagctgccatgcccagccacatgcagatgttttaaattaaaagttgcactgagtgtgtcccctcctcttgcctcccctccacctcttctacctctgccatctctgagacagcaagaccaccctctcctttcctcctcctcagcctacttaacctggagacaaaaaaaggataaaagcctttatgatgatccactgtcacttaatgaatagtaaatatgttttatcttccttatgattttcatagtaacattttattttccccagcttatgttattgtaagagtacagtatataatataaataaacatgcaaaatacattgatttaccgtttatgttaacaataaggcttctggtcaagagtagggttttagtggttcaattgttgggaagccaaaagttatacaaagattttctacggggtcctcagcacccttaacccctgccttattcgagaatcaactgcaatttcctgagtgttctctgtgtgcgatgtgcacccctggaaggcaagagatctgtggtcaaagtcaggggctgttccagggatgttgacgagggtccacatggtgtgacctccaagctacaggatcaggtcaccccaggtcctgctcatggagagtcccaggctgcccaactccatgcagtgcaggatgagctcaaggagaggacaggagttgtccagagaacagcaaatcaagatttggagaactgtccaccagggggataggctgcctcagaaggagccacctgtccccaaggtttcaaaggtaggacccagagaggtgtctctgggggcttcagagagaggacaccagcctaggaggtggtccccagagagccctgtgttcctccatcacagcactgggggtgctgcctccaggtcatctgtgtccctgtctgtcgtctgctccaggcctcctggcaggacccaggagctggggcatttcccacctggatactcaggcaggggtttcctggttcctctgttatgggagggggaggccctatgacccttagcctctctgagatggaaacaaaggcagatcctgggttatcctgtcctcctgcaggggaagttcccctgggtccccaggtctccttgggctggttagaggtctccagagaccacagccaggagcccccatctccagggaccctcgggggtggggtgtcatcacccaacttccttgtgatcaggtcccctggtggtcactccatctgggatggaggatccagagtctgcagcaggtcaggtgtctttgtgagaagaggaaggacataggctgctggcccaggccccctgggagtcgtgacatgactcacaagtcagagacggggaaggggtgtcactgttctgggatgagtcagattctgacccccctctcttagaaggccctgtcctccctcttgaagctctgagggttcaggccctgtccctggggcagccttgggcacttgttggcctcctcccatgctggcaccagtgcctctgtgtccacaaagaacagaccctgactccgggggtcacacagaggtgatgtgcttctgttgtgtgaccgcccacgcatttaaccagtatttgttgagcatctgttgtatgtcagacactggactgggccctgggattccacaaaaagcaggacagacgtggcccctgtgctcatggagtttccctgtaacagggagacaggtgctcagtgaacatcatgggactgaagagctaatgctaatgagagaagggctgtgaatgtgctctgaggatcacagggagctgccctaggagatgcctttcggctgagccccagggaggaggcgatgtgggggcaggagctgcccgcagaagttgtgacttggtggacggccactggactgcaaggaggagctgacagagtgcgtctggggagcttggagggcgaggaggaggtgggtcgaggtgatcctggtgagggtataccctgggggactctagtccagctgaaggacgtcagcggacgctggggaggtgccaggccgggagggactctgctgccctctgggggacaatgaggaaagtgtagacggaaaaatcaggataggtttaactcaacgtgatcattaagcattgatcacgtttgcttgacgctttaaattctagatatctctcacgcaagctcttctctactctacccccagcgaatcatcaaaattagattgtggtcttatgtcaggtcaagttctgtgtgcacttagagggatcccacacagtattcacacttgagggccggctggagcatgtgtgggtagaagggaggattcgtgtccgtgtatcctcacaagagccagggtgtctgggtggataaggctccacttgaccccaaaagtcctcagaacaagggagcagagcctgatgaaatcagaatccaggggtggggctggggctctgtgcctcctcctcctcccttcctctctctctctggggagttcgccctcctctccctcagcagaattcttgggcctcctcatatgaagaaacgtgatgggcccttacagacccacccagagatttttagcagagacatcaggtttcagtgtcaggagcaccagtcacccctcaggcctccccagacccctcctcagagacagatataaatatatctgtatataccttcagtgtgttagtatctttatgaataagtagagtttcttgcaagcagcatatgcttggatcatgtttttttatctgtttcatatttttaatctgtttcaccaatctgtatcttttaagtggagcatttaatccatttacatttaaggttcatattgacatgtgaggttttcttcctgtcataatgataattgtcagctagttactttgtagcttgtttctttttttagtttatggacttttcttttctgtttggaactccttcgagcatttcttaaattccctcagaatttgcttctgggaaagactttatttctccattttgaagcttattcttgcaggataaaaaattcaaagttgatgtttattgttgtttttttctttaagtactttgaaaatagattctcaatcccttctggcttgtagggattctgcagagaagtctactgctagtctgatggggtttcctttataggagattaaacacttttctcttgctgattttaggattttttccttcatgttgaccttagacagcctgataactatagttgcggtgaggtccttcttgcaatgtatctgcctggttctatttaagccttttctatctgaatgcctagatgtcttgctagactagctaagttttcctcaataatttcctcaaataggttgaccaaactttacagtttttcttctccctcagaaatacctataattcctaggtttggatgttttacttagccccatgcctctcaaaggttttgttcctttgtaaatgttttttctttatttttctctgactggattaattataaagacctgtcttcaagttctgagattctttcttctgcttgatctggtctgttgttaaagctttcaactgcattttgtaattccttcaattttttttttattttcagaagttccatttgtttgtttgtttaatatctatctttctggtaaatttctcattcatatcctgaattgattttctgatttctttgcattagttttcatatttatcttggatctaatggagcttctagaaaatcaatattttgaatcctttatctggtatcttaaagattttattttcattagaatctattgctggatagttagtgtgatctttttggggtgttatcctatttttttatgcttccagaattgttacactggttccttctcatttgtagaaactgtcacttctttttatttttgaatttacttttgatggaacttttttcttgaaattgcaattatattgcatgttgagtagggtcaattggctttccttctgggtgctttcaatggcagacactctatatgaattctttggttatagatagccttagtgtggtggctttttcaaatgccagtgactgtagcagtgcgtcaggtatgtgagcaaactcatggcctcctgcagaactagagtggcagagatctcaagaaccttatctttaaaaaaattaataataataataataataataaaagaaacttatcttgttcccaagttccatgcacttgattgtcaagttttgcactgggtttagaagatcagcctccaagccattaggtgtcatttgaaggtaaagagccagctgcaggccaggctcagtggttcacacctgtaatcccaacactttgggaggccaaggtgagcagatcacctgaggtcaggttcgaggccagcctggccaacatggtgaaaccccatctctactaaaaatacaaaaattagccagatgtggtggtccgtgcctgtgatcccagctactcgggaggctgaaacaggagaattgcttgaacccaggagacagaggttgcaatgagctgagatcacaccattgcactccagcctgggcaacaaaagtgaaactccatctcacaaaaaaaagagagagagagagagccaactgcagtactgcagtgatagcagtggggcttatgctttgtttaccagaagaagctttttagtgctttagacagtgagctggtctgtctaacccaagtgacctgggctccatactcagccccagaagtgaagggtgaagctgggtggagccaaaccaggcaagcctaccctcagggctcccagtggcctgagaaccattggacccaggacccattacttctagggtaaggaaggtacaaacaccagatccaaccatggtctggggggacagctgtcaaatgcctaaaaatatacctgggagaggagcaggcaaactatcactgccccaggttctctgaacagaaacagaggggcaacccaaagtccaaatccaggtgagcaggtgcaccaaatgcccagagatatgacgaggcaagaagtgaaggaaccacccctgcatcaaatgttttgcatgggaaggagaagggggttgctcatgttcccaatccaggagaatgcatttgggatctgccttcttctcactccttggttagcaagactaagcaaccaggactctggatttggggaaagacgtttatttgtggaggccagtgatgacaatcccacgagggcctaggtgaagagggcaggaaggctcgagacactggggactgagtgaaaaccacacccatgatctgcaccacccatggatgctccttcattgctcacctttctgttgatatcagatggccccattttctgtaccttcacagaaggacacaggctagggtctgtgcatggccttcatccccggggccatgtgaggacagcaggtgggaaagatcatgggtcctcctgggtcctgcagggccagaacattcatcacccatactgacctcctagatgggaatggcttccctggggctgggccaacggggcctgggcaggggagaaaggacgtcaggggacagggaggaagggtcatcgagacccagcctggaaggttcttgtctctgaccatccaggatttacttccctgcatctacctttggtcattttccctcagcaatgaccagctctgcttcctgatctcagcctcccaccctggacacagcaccccagtccctggcccggctgcatccacccaataccctgataacccaggacccattacttctagggtaaggagggtccaggagacagaagctgaggaaaggtctgaagaagtcacatctgtcctggccagaggggaaaaaccatcagatgctgaaccaggagaatgttgacccaggaaagggaccgaggacccaagaaaggagtcagaccaccagggtttgcctgagaggaaggatcaaggccccgagggaaagcagggccggctgcatgtgcaggacactggtggggcatatgtgtcttagattctccctgaattcagtgtccctgccatggccagactctctactcaggcctggacatgctgaaataggacaatggccttgtcctctctccccaccatttggcaagagacataaaggacattccaggacatggcttcctgggaggtccaggttctctgtctcacacctcagggactgtagttactgcatcagccatggtaggtgctgatctcacccagcctgtccaggcccttccactctccactttgtgaccatgtccaggaccacccctcagatcctgagcctgcaaatacccccttgctgggtgggtggattcagtaaacagtgagctcctatccagcccccagagccacctctgtcaccttcctgctgggcatcatcccaccttcacaagcactaaagagcatggggagacctggctagctgggtttctgcatcacaaagaaaataatcccccaggttcggattcccagggctctgtatgtggagctgacagacctgaggccaggagatagcagaggtcagccctagggagggtgggtcatccacccaggggacaggggtgcaccagccttgctactgaaagggcctccccaggacagcgccatcagccctgcctgagagctttgctaaacagcagtcagaggaggccatggcagtggctgagctcctgctccaggccccaacagaccagaccaacagcacaatgcagtccttccccaacgtcacaggtcaccaaagggaaactgaggtgctacctaaccttagagccatcaggggagataacagcccaatttcccaaacaggccagtttcaatcccatgacaatgacctctctgctctcattcttcccaaaataggacgctgattctcccccatcatggatttctcccttgtcccgggagccttttctgccccctatgatctgggcactcctgacacacacctcctctctggtgacatatcagggtccctcactgtcaagcagtccagaaaggacagaaccttggacagcgcccatctcagcttcacccttcctccttcacagggttcagggcaaagaataaatggcagaggccagtgagcccagagatggtgacaggcagtgacccaggggcagatgcctggagcaggagctggcggggccacagggagaaggtgatgcaggaagggaaacccagaaatgggcaggaaaggaggacacaggctctgtggggctgcagcccagggttggactatgagtgtgaagccatctcagcaagtaaggccaggtcccatgaacaagagtgggagcacgtggcttcctgctctgtatatggggtgggggattccatgccccatagaaccagatggccggggttcagatggagaaggagcaggacaggggatccccaggataggaggaccccagtgtccccacccaggcaggtgactgatgaatgggcatgcagggtcctcctgggctgggctctccctttgtccctcaggattccttgaaggaacatccggaagccgaccacatctacctggtgggttctggggagtccatgtaaagccaggagcttgtgttgctaggaggggtcatggcatgtgctgggggcaccaaagagagaaacctgagggcaggcaggacctggtctgaggaggcatgggagcccagatggggagatggatgtcaggaaaggctgccccatcagggagggtgatagcaatggggggtctgtgggagtgggcacgtgggattccctgggctctgccaagttccctcccatagtcacaacctggggacactgcccatgaaggggcgcctttgcccagccagatgctgctggttctgcccatccactaccctctctgctccagccactctgggtctttctccagatgccctggacagccctggcctggacctgtcccctgagaggtgttgggagaagctgagtctctggggacactctcatcagagtctgaaaggcacatcaggaaacatccctggtctccaggactaggcaatgaggaaagggccccagctcctccctttgccactgagagggtcgaccctgggtggccacagtgacttctgcgtctgtcccagtcaccctgaaaccacaacaaaaccccagccccagaccctgcaggtacaatacatgtggggacagtctgtacccaggggaagccagttctctcttcctaggagaccgggcctcagggctgtgcccggggcaggcgggggcagcacgtgcctgtccttgagaactcgggaccttaagggtctctgctctgtgaggcacagcaaggatccttctgtccagagatgaaagcagctcctgcccctcctctgacctcttcctccttcccaaatctcaaccaacaaataggtgtttcaaatctcatcatcaaatcttcatccatccacatgagaaagcttaaaacccaatggattgacaacatcaagagttggaacaagtggacatggagatgttacttgtggaaatttagatgtgttcagctatcgggcaggagaatctgtgtcaaattccagcatggttcagaagaatcaaaaagtgtcacagtccaaatgtgcaacagtgcaggggataaaactgtggtgcattcaaactgagggatattttggaacatgagaaaggaagggattgctgctgcacagaacatggatgatctcacacatagagttgaaagaaaggagtcaatcgcagaatagaaaatgatcactaattccacctctataaagtttccaagaggaaaacccaattctgctgctagagatcagaatggaggtgacctgtgccttgcaatggctgtgagggtcacgggagtgtcacttagtgcaggcaatgtgccgtatcttaatctgggcagggctttcatgagcacataggaatgcagacattactgctgtgttcattttacttcaccggaaaagaagaataaaatcagccgggcgcggtggctcacgcctgtaatcccagcactttagaaggctgaggtgggcagattacttgaggtcaggagttcaagaccaccctggccaatatggtgaaaccccggctctactaaaaatacaaaaattagctgggcatggtggtgcgcgcctgtaatcccagctactcgggaggctgaggctggacaattgcttggacccaggaagcagaggttgcagtgagccaagattgtgccactgcactccagcttgggcaacagagccagactctgtaaaaaaaaaaaaaaaaaaaaaaaaaaaaaaaaagaaagaaagaaaaagaaaagaaagtataaaatctctttgggttaacaaaaaaagatccacaaaacaaacaccagctcttatcaaacttacacaactctgccagagaacaggaaacacaaatactcattaactcacttttgtggcaataaaaccttcatgtcaaaaggagaccaggacacaatgaggaagtaaaactgcaggccctacttgggtgcagagagggaaaatccacaaataaaacattaccagaaggagctaagatttactgcattgagttcattccccaggtatgcaaggtgattttaacacctgaaaatcaatcattgcctttactacatagacagattagctagaaaaaaattacaactagcagaacagaagcaatttggccttcctaaaattccacatcatatcatcatgatggagacagtgcagacgccaatgacaataaaaagagggacctccgtcacccggtaaacatgtccacacagctccagcaagcacccgtcttcccagtgaatcactgtaacctcccctttaatcagccccaggcaaggctgcctgcgatggccacacaggctccaacccgtgggcctcaacctcccgcagaggctctcctttggccaccccatggggagagcatgaggacagggcagagccctctgatgcccacacatggcaggagctgacgccagagccatgggggctggagagcagagctgctggggtcagagcttcctgaggacacccaggcctaagggaaggcagctccctggatgggggcaaccaggctccgggctccaacctcagagcccgcatgggaggagccagcactctaggcctttcctagggtgactctgaggggaccctgacacgacaggatcgctgaatgcacccgagatgaaggggccaccacgggaccctgctctcgtggcagatcaggagagagtgggacaccatgccaggcccccatggcatggctgcgactgacccaggccactcccctgcatgcatcagcctcggtaagtcacatgaccaagcccaggaccaatgtggaaggaaggaaacagcatcccctttagtgatggaacccaaggtcagtgcaaagagaggccatgagcagttaggaagggtggtccaacctacagcacaaaccatcgtctatcataagtagaagccctgctccatgacccctgcatttaaataaacgtttgttaaatgagtcaaattccctcaccatgagagctcacctgtgtgtaggcccatcacacacacaaacacacacacacacacacacacacacacacacagggaaagtgcaggatcctggacagcaccaggcaggcttcacaggcagagcaaacagcgtgaatgacccatgcagtgccctgggccccatcagctcagagaccctgtgagggctgagatggggctaggcaggggagagacttagagagggtggggcctccagggagggggctgcagggagctgggtactgccctccagggagggggctgcagggagctgggtactgccctccagggagggggctgcagggagctgggtactgccctccagggagggggctgcagggagctgggtactgccctccagggagggggctgcagggagctgggtactgccctccagggaggcaggagcactgttcccaacagagagcacatcttcctgcagcagctgcacagacacaggagcccccatgactgccctgggccagggtgtggattccaaatttcgtgccccattgggtgggacggaggttgaccgtgacatccaaggggcatctgtgattccaaacttaaactactgtgcctacaaaataggaaataaccctactttttctactatctcaaattccctaagcacaagctagcaccctttaaatcaggaagttcagtcactcctggggtcctcccatgcccccagtctgacttgcaggtgcacagggtggctgacatctgtccttgctcctcctcttggctcaactgccgcccctcctgggggtgactgatggtcaggacaagggatcctagagctggccccatgattgacaggaaggcaggacttggcctccattctgaagactaggggtgtcaagagagctgggcatcccacagagctgcacaagatgacgcggacagagggtgacacagggctcagggcttcagacgggtcgggaggctcagctgagagttcagggacagacctgaggagcctcagtgggaaaagaagcactgaagtgggaagttctggaatgttctggacaagcctgagtgctctaaggaaatgctcccaccccgatgtagcctgcagcactggacggtctgtgtacctccccgctgcccatcctctcacagcccccgcctctagggacacaactcctgccctaacgtgcatctttcctgtctcattccacacaaaagggcctctggggtccctgttctgcattgcaaggagtggaggtcacgttcccacagaccacccagcaacagggtcctatggaggtgcggtcaggaggatcacacgtccccccatgcccaggggactgactctgggggtgatggattggcctggaggccactggtcccctctgtccctgaggggaacctgcaccctggaggctgccacatccctcctgattctttcagctgagggcccttcttgaaatcccagggaggactcaacccccactgggaaaggcccagtgtggacggttccacagcagcccagctaaggcccttggacacagatcctgagtgagagaacctttagggacacaggtgcacggccatgtccccagtgcccacacagagcaggggcatctggaccctgagtgtgtagctcccgcgactgaacccagcccttccccaatgacgtgacccctggggtggctccaggtctccagtccatgccaccaaaatctccagattgagggtcctcccttgagtccctgatgcctgtccaggagctgccccctgagcaaatctagagtgcagagggctgggattgtggcagtaaaagcagccacatttgtctcaggaaggaaagggaggacatgagctccaggaagggcgatggcgtcctctagtgggcgcctcctgttaatgagcaaaaaggggccaggagagttgagagatcagggctggccttggactaaggctcagatggagaggactgaggtgcaaagagggggctgaagtaggggagtggtcgggagagatgggaggagcaggtaaggggaagccccagggaggccgggggagggtacagcagagctctccactcctcagcattgacatttggggtggtcgtgctagtggggttctgtaagttgtagggtgttcagcaccatctggggactctacccactaaatgccagcaggactccctccccaagctctaacaaccaacaatgtctccagactttccaaatgtcccctggagagcaaaattgcttctggcagaatcactgatctacgtcagtctctaaaagtgactcatcagcgaaatccttcacctcttgggagaagaatcacaagtgtgagaggggtagaaactgcagacttcaaaatctttccaaaagagttttacttaatcagcagtttgatgtcccaggagaagatacatttagagtgtttagagttgatgccacatggctgcctgtacctcacagcaggagcagagtgggttttccaagggcctgtaaccacaactggaatgacactcactgggttacattacaaagtggaatgtggggaattctgtagactttgggaagggaaatgtatgacgtgagcccacagcctaaggcagtggacagtccactttgaggctctcaccatctaggagacatctcagccatgaacatagccacatctgtcattagaaaacatgttttattaagaggaaaaatctaggctagaagtgctttatgctcttttttctctttatgttcaaattcatatacttttagatcattccttaaagaagaatctatccccctaagtaaatgttatcactgactggatagtgttggtgtctcactcccaacccctgtgtggtgacagtgccctgcttccccagccctgggccctctctgattcctgagagctttgggtgctccttcattaggaggaagagaggaagggtgtttttaatattctcaccattcacccatccacctcttagacactgggaagaatcagttgcccactcttggatttgatcctcgaattaatgacctctatttctgtcccttgtccatttcaacaatgtgacaggcctaagaggtgccttctccatgtgatttttgaggagaaggttctcaagataagttttctcacacctctttgaattacctccacctgtgtccccatcaccattaccagcagcatttggaccctttttctgttagtcagatgctttccacctcttgagggtgtatactgtatgctctctacacaggaatatgcagaggaaatagaaaaagggaaatcgcattactattcagagagaagaagacctttatgtgaatgaatgagagtctaaaatcctaagagagcccatataaaattattaccagtgctaaaactacaaaagttacactaacagtaaactagaataataaaacatgcatcacagttgctggtaaagctaaatcagatatttttttcttagaaaaagcattccatgtgtgttgcagtgatgacaggagtgcccttcagtcaatatgctgcctgtaatttttgttccctggcagaatgtattgtcttttctccctttaaatcttaaatgcaaaactaaaggcagctcctgggccccctccccaaagtcagctgcctgcaaccagccccacgaagagcagaggcctgagcttccctggtcaaaatagggggctagggagcttaaccttgctcgataaagctgtgttcctagaatgtcgctcctgttcccaggggcaccagcctggagggtggtgagcctcactggtggcctgatgcttaccttgtgccctcacaccagtggtcactggaaccttgaacacttggctgtcgcccggatctgcagatgtcaagaacttctggaagtcaaattactgcccacttctccagggcagatacctgtgaacatccaaaaccatgccacagaaccctgcctggggtctacaacacatatggactgtgagcaccaagtccagccctgaatctgtgaccacctgccaagatgcccctaactgggatccaccaatcactgcacatggcaggcagcgaggcttggaggtgcttcgccacaaggcagccccaatttgctgggagtttcttggcacctggtagtggtgaggagccttgggaccctcaggattactccccttaagcatagtggggacccttctgcatccccagcaggtgccccgctcttcagagcctctctctctgaggtttacccagacccctgcaccaatgagaccatgctgaagcctcagagagagagatggagctttgaccaggagccgctcttccttgagggccagggcagggaaagcaggaggcagcaccaggagtgggaacaccagtgtctaagcccctgatgagaacagggtggtctctcccatatgcccataccaggcctgtgaacagaatcctccttctgcagtgacaatgtctgagaggacgacatgtttcccagcctaacgtgcagccatgcccatctacccactgcctactgcaggacagcaccaacccaggagctgggaagctgggagaagacatggaatacccatggcttctcaccttcctccagtccagtgggcaccatttatgcctaggacacccacctgccggccccaggctcttaagagttaggtcacctaggtgcctctgggaggccgaggcaggagaattgcttgaacccgggaggcagaggttgcagtgagccgagatcacaccactgcactccagcctgggtgacagaatgagactctgtctcaaaaaaaaagagaaagatagcatcagtggctaccaagggctaggggcaggggaaggtggagagttaatgattaatagtatgaagtttctatgtgagatgatgaaaatgttctggaaaaaaaaatatagtggtgaggatgtagaatattgtgaatataattaacggcatttaattgtacacttaacatgattaatgtggcatattttatcttatgtatttgactacatccaagaaacactgggagagggaaagcccaccatgtaaaatacacccaccctaatcagatagtcctcattgtacccaggtacaggcccctcatgacctgcacaggaataactaaggatttaaggacatgaggcttcccagccaactgcaggtgcacaacataaatgtatctgcaaacagactgagagtaaagctgggggcacaaacctcagcactgccaggacacacacccttctcgtggattctgactttatctgacccggcccactgtccagatcttgttgtgggattgggacaagggaggtcataaagcctgtccccagggcactctgtgtgagcacacgagacctccccacccccccaccgttaggtctccacacatagatctgaccattaggcattgtgaggaggactctagcgcgggctcagggatcacaccagagaatcaggtacagagaggaagacggggctcgaggagctgatggatgacacagagcagggttcctgcagtccacaggtccagctcaccctggtgtaggtgccccatccccctgatccaggcatccctgacacagctccctcccggagcctcctcccaggtgacacatcagggtccctcactcaagctgtccagagagggcagcaccttggacagcgcccaccccacttcactcttcctccctcacagggctcagggctcagggctcaagtctcagaacaaatggcagaggccagtgagcccagagatggtgacagggcaatgatccaggggcagctgcctgaaacgggagcaggtgaagccacagatgggagaagatggttcaggaagaaaaatccaggaatgggcaggagaggagaggaggacacaggctctgtggggctgcagcccaggatgggactaagtgtgaagacatctcagcaggtgaggccaggtcccatgaacagagaagcagctcccacctcccctgatgcacggacacacagagtgtgtggtgctgtgcccccagagtcgggctctcctgttctggtccccagggagtgagaagtgaggttgacttgtccctgctcctctctgctaccccaacattcaccttctcctcatgcccctctctctcaaatatgatttggatctatgtccccgcccaaatctcatgtcaaattgtaaaccccaatgttggaggtggggccttgtgagaagtgattggataatgcgggtggattttctgctttgatgctgtttctgtgatagagatctcacatgatctggttgtttaaaagtgtgtagcacctctcccctctctctctctctctcttactcatgctctgccatgtaagacgttcctgtttccccttcaccgtccagaatgattgtaagttttctgaggcctccccaggagcagaagccactatgcttcctgtacaactgcagaatgatgagcgaattaaacctcttttctttataaattacccagtctcaggtatttctttatagcaatgcgaggacagactaatacaatcttctactcccagatccccgcacacgcttagccccagacatcactgcccctgggagcatgcacagcgcagcctcctgccgacaaaagcaaagtcacaaaaggtgacaaaaatctgcatttggggacatctgattgtgaaagagggaggacagtacacttgtagccacagagactggggctcaccgagctgaaacctggtagcactttggcataacatgtgcatgacccgtgttcaatgtctagagatcagtgttgagtaaaacagcctggtctggggccgctgctgtccccacttccctcctgtccaccagagggcggcagagttcctcccaccctggagcctccccaggggctgctgacctccctcagccgggcccacagcccagcagggtccaccctcacccgggtcacctcggcccacgtcctcctcgccctccgagctcctcacacggactctgtcagctcctccctgcagcctatcggccgcccacctgaggcttgtcggccgcccacttgaggcctgtcggctgccctctgcaggcagctcctgtcccctacaccccctccttccccgggctcagctgaaagggcgtctcccagggcagctccctgtgatctccaggacagctcagtctctcacaggctccgacgccccctatgctgtcacctcacagccctgtcattaccattaactcctcagtcccatgaagttcactgagcgcctgtctcccggttacaggaaaactctgtgacagggaccacgtctgtcctgctctctgtggaatcccagggcccagcccagtgcctgacacggaacagatgctccataaatactggttaaatgtgtgggagatctctaaaaagaagcatatcacctccgtgtggcccccagcagtcagagtctgttccatgtggacacaggggcactggcaccagcatgggaggaggccagcaagtgcccgcggctgccccaggaatgaggcctcaacccccagagcttcagaagggaggacagaggcctgcagggaatagatcctccggcctgaccctgcagcctaatccagagttcagggtcagctcacaccacgtcgaccctggtcagcatccctagggcagttccagacaaggccggaggtctcctcttgccctccagggggtgacattgcacacagacatcactcaggaaacggattcccctggacaggaacctggctttgctaaggaagtggaggtggagcctggtttccatcccttgctccaacagacccttctgatctctcccacatacctgctctgttcctttctgggtcctatgaggaccctgttctgccaggggtccctgtgcaactccagactccctcctggtaccaccatggggaaggtggggtgatcacaggacagtcagcctcgcagaggacagagaccacccaggactgtcagggagaacatggacaggccctgagccgcagctcagccaacagacacggagagggagggtccccctggagccttccccaaggacagcagagcccagagtcacccacctccctccaccacagtcctctctttccaggacacacaagacacctccccctccacatgcaggatctggggactcctgagacctctgggcctgggtctccatccctgggtcagtggcggggttggtggtactggagacagagggctggtccctccccagccaccacccagtgagcctttttctagcccccagagccacctctgtcaccttcctgttgggcatcatcccaccttcccagagccctggagagcatggggagacccgggaccctgctgggtttctctgtcacaaaggaaaataatccccctggtgtgacagacccaaggacagaacacagcagaggtcagcactggggaagacaggttgtcctcccaggggatgggggtccatccaccttgccgaaaagatttgtctgaggaactgaaaatagaagggaaaaaagaggagggacaaaagaggcagaaatgagaggggaggggacagaggacacctgaataaagaccacacccatgacccacgtgatgctgagaagtactcctgccctaggaagagactcagggcagagggaggaaggacagcagaccagacagtcacagcagccttgacaaaacgttcctggaactcaagctcttctccacagaggaggacagagcagacagcagagaccatggagtctccctcggcccctccccacagatggtgcatcccctggcagaggctcctgctcacaggtgaagggaggacaacctgggagagggtgggaggagggagctggggtctcctgggtaggacagggctgtgagacggacagagggctcctgttggagcctgaatagggaagaggacatcagagagggacaggagtcacaccagaaaaatcaaattgaactggaattggaaaggggcaggaaaacctcaagagttctattttcctagttaattgtcactggccactacgtttttaaaaatcataataactgcatcagatgacactttaaataaaaacataaccagggcatgaaacactgtcctcatccgcctaccgcggacattggaaaataagccccaggctgtggagggccctgggaaccctcatgaactcatccacaggaatctgcagcctgtcccaggcactggggtgcaaccaagatcacacaaatccctgccctcatgaagctcatgctctcatggggaggaagacagacatacaaagagatctagaatgtgaggtcaggtgttgacaagagccctggagggaatagagcagggaaaggtcagaaaaggaagacccagggtctctagaggaggtgtcagggaagggatctcccaagaatgccctgatgtgagcaggacctgaaggcaatggggagggagccgtgaagacccctggaaaagcagattccacacagggaaatgccaaggtcagaggtgctaaggaaataggagacacactgctgaccttgacctagtaggacacacacacacacacacacacacacacactcactcactccagggctgggggatgaagagacctgctcaggacccaggaccccatttttccaccctaatgcataggtcccaatattgaccgatgctctctgctctctcctagcctcacttctaaccttctggaacccgcccaccactgccaagctcactattgaatccacgccgttcaatgtcgcagaggggaaggaggtgcttctacttgtccacaatctgccccagcatctttttggctacagctggtacaaaggtgaaagagtggatggcaaccgtcaaattataggatatgtaataggaactcaacaagctaccccagggcccgcatacagtggtcgagagataatataccccaatgcatccctgctgatccagaacatcatccagaatgacacaggattctacaccctacacgtcataaagtcagatcttgtgaatgaagaagcaactggccagttccgggtataccgtgagtgattcccccatgacctctgggtgttgggggtcagttctacttcccacacacaggattatcaggcctgggctgtgcctgtggccccctctgcattacgcaccatgttagggtttgggcatttagtgcaggatacacacagaagagacaaacttcaacagatcagaattcctttccggcatccagaccctgcagacactcactgcagaggaaggacagtctgatgtgggggacttagcagggggaggtcagtctcagccaagcaccccgtgccctccccgtaaacctgaccctgagaaagaccctggagaactgcatcagagcctggcctgagggacccctgggatattcacagagaagctcagccccagggctcctggttccaggtgactcaggggagcctgtgccagggctgtgttgtggcctcctgggcaaggctaactggaagcaaggacttagcagctgtccaagggctgtggctcctggagctggattctggatgcagaatcggactttctggccacacttgttccctgtccccagagtctcatttggacaaggacagagccttgtcctttacttgagactcaatgtggggaggatagatagacaaggttattagggtgtcagtccattgccctggggacataggtgactccatgggaagctcagtgtccccaggaagaggaacagaggagagaagatgctcccggcagctccttgtccaccagggatcaggcccagggccttctctcttggaggcaaataaacataaatgatgttcatttgagcagctcctctgtgcagagctgagatcaagtaattgtaaatattttgaggttaattcacaaacaacctcacagccaaatagcacttatcctacttattgaaaggaaattgaggcacagggagacagtcactaacaagggtcacacaggccataggtgtcagattgaagtcacatgaggtctgtctgtagccacagccccctcctctcctcaactgggggtgggtggggctgtttgttgttaggcatctgcatctgagaccagtcatgggcttgcgttcttttgtcttgggcatccacagctcagaagcggagattctggtctggagagtgataagtaaatggagaaataatcagttttactctagaactagatcacctcaacagtcagggtcagtgccgggattgtccaggcctctccctgagatccacagccccctcacatgacctcaaatcctgtgtttcccgatgtgtcagtgtcactcccacggaaggataaaggaaaggacttcgctttctctccccactcacaccctgtgccaacagaggcccaaagtgagacacacgcttgctcagtagctctctcatgaaggggggaatgagtgaaggaatgatccataacctctatagagactggatcctggatgcagaatcctgggaggttctgaccacacctgttccgtgtccatcaggggctgagatccatgtaccattcctctgaccccctgtcccgaaagccaccctatctcatgtgactctggggttccttggccatgggagggttttcaaggctccctggtcctggtcgggacagccaagggactcctagtcctggggtctccgaggtcactataccccgcatggctcattgccatgggcatttctgactttcttctattcctccatgttcttcgtcttcctccctcttcattccagctgagatgcccatccctgaacatcttcctccactcttaggccttccccagacactcccttgaacaaggctggctgtcctgttttcttgccgctcacactgtgtcctggcccacttcccaggcaatagggaaggcacagaaatcacaggcaatagggaaggcacagatggagcccctgccaggctccatcacaagccaatgtcaacaggtcaccaggagaatgagcttccgctgtgttcctgcccagggctctttacttccatgaggccaacacacggaacaggcagcaggacgggaatgagcgactcctccatccactccctacactgactcaccagggggtcagaggcagaaggacaggtctgcagtccccaaagcccgcatgcttatttcactcacttcactacccactccatcttcatcctggtgtggggctcacatcctccagtggatcctgggacctcccccaggtggagctggccaggcaggtgctgtctgataggtttgctgcccattccacatacacctgtgtcctcatgatgatgccattgtcataaggtggagtcccttggactgagaagtgaaccagccactggcgtctcacttagactctacccagttacaaaaacttaaactctagttgtgttttctgaggttgataggagaggaagaaaacctttcacatgcctgttttgaggcttctcctctttttgcctaactctgcacaggaactaggggcagggagcgctttctaaatttactaacatcacacacattgcttctcctaacttggcatcatttctccctttatgtaattgacacacctaagagttcctctctgaccggttctgtcctcttaacaggtctcacatccctctctctgttcagggagtcactgatttcaaaccactttcagcatcttcctttgagcataatgtgatcactttggaattcagagcagacctaaaccttagcataatattaaaagaagtactacttccagcaattgatcttagatctttaggccattgataagaatttccacttatggaaaaaatttaatgtttcccccaaatgtctttcacttttttaactatagtcagaaaataacatgagatctaaactcctgacaaatttttaagggcaaattatagtactacagattgagtatcccaaatcctaaaatccaaaatctgaaatgctccaaaatccaacattttttgaccactgacatgattctcaaaagaaatgctcactgaaggccgggcacggtggctcatgcctgtaatcccagcacttcgggaggccaaggcgggaagatcacaaagtcaagagatcaagaccatcctggccaacatggtgaaaccccgtctctactaaaaatacaaaaattagctgggcgtggtggcatgcacctacagtctcagctactttggaggctgaggcaggagaatcgcttgaacccgggaggtggaggttgcagtgagctgagatcgtgccactgcactccagcctggcaacagagcgagactccatctcaaaaaaaagaaaaagaaagaaaagaaaagaaaaaagaaaggctcactggagcactttggattccgtattttcagatttggggtgctaaactggtaagtatattgcaaatattcaaaactcaaaaacagtcagaaatccaaaacacttttagtcctaagccttacacataagacatactcaatctgtatgaactataggcaccaagctgaacagcagatccctagaacctcctcatcctgcataactgaaactgcagacccatgaacaactctccattcccccagttcccaggctttgacaaccaccattctactctctgattccacaagtgtgactactctagggacttcatataagtggaatcctacagtatctgccctgtgagtggcttatttcatttagcataatgtccaatgggagaaaataattgcaaaacttcttctcaaagttctgtctcataactgtcaaacacacatggtccttgagggccagatttccagcagttcatgctcccccttttccaccagtcagttctgcatttgcaaatgtccacatgtatttatggagagatccacagcatcctcgcctgccctctgcaaggggagaagggacattaaagaccaaagacaggccgggtgcagtggctcatgcttgtaatcccagcactttgggaggccaaggtgggcagaacacctgaggtcagaagttcaagaccagcctgaccaatatggtgaaaccccatctctactaaaaatacaaaatttagctgggtgtggtggtgggcgcctgtagtcccagctactcgggaggctgagacaggagaatcgcttgaacccgggaggcagaggttgccatgagccgagatcgtgcctggccaacacagcaagactccatctcaaaaaacaaacaaacaaacaaagaccaaagacaaagaacatacatatggttctgctgttaaatccgggcagctcctgcctgtcacctgaagttctagatcattccctggactccactctatctttaggggtctctggctcaagtcagtcatcatcaaacacctgggaaaaactgccccaccttgtgcctccactgcctaacgactgagctgacctccaggcttgcctctggtgtcccctgtgttatttctactgaaacatccagtcccaggccaggctgcacaatatgtacagggtttaaggacaatgggaagacccatcactatccatttctaggatgtccttgcaaagggaaaccacagaaaaaatatacctagggaaacaaagtaggactgaaggtggaagggacccagcacttgaatgttccaggtgaggaccctacagtgggccaagtagtcaactggtcagggagggaccaggagaggcaccaggagctgtgacctcccccccagtcctgtgtctgttcacagcccaatgctgctgcttaattcacacttgagaaagtctgtgcttcccccacaccgagcaggcagcctcgcagtctctgagatctcagatcatcgtgcatctgtcttgtgacacatgcacccaccgtgggtttttaagggctcaggtgggctgagaggtggaaggtgccaactctgattgaaagatgcctgtgaggaatcaaaggtgccacacagggcaatcttctctctgttatctgcacagcggagctgcccaagccctccatctccagcaacaactccaaacccgtggaggacaaggatgctgtggccttcacctgtgaacctgagactcaggacgcaacctacctgtggtgggtaaacaatcagagcctcccggtcagtcccaggctgcagctgtccaatggcaacaggaccctcactctattcaatgtcacaagaaatgacacagcaagctacaaatgtgaaacccagaacccagtgagtgccaggcgcagtgattcagtcatcctgaatgtcctctgtgagtatatctgctcctctctggcccaggctgccagcccaaatccacagggccagaggcaggatttctcagtccctctcaggttcaagtacacagaccctcaaccctggacatccagactgtctgtgactttctgccccagaaaaacctgggcagaccaagtcttgaccaagaataggaggggaggggctgcttctgtcctgggaggctcagggtccacaccctatgatgggagaaacaggtgaatatctcagactcaggctcagtagatacaagaggggtttggctgagactttaggattgtgattcagcttagagggacactgtggtccttccatagaccaggaacttccacttccctctgacaatatcacctgtggctttattttgtttgctccagatggcccggatgcccccaccatttcccctctaaacacatcttacagatcaggggaaaatctgaacctctcctgccacgcagcctctaacccacctgcacagtactcttggtttgtcaatgggactttccagcaatccacccaagagctctttatccccaacatcactgtgaataatagtggatcctatacgtgccaagcccataactcagacactggcctcaataggaccacagtcacgacgatcacagtctatggtaagtggatccacgaagcactgacatcatgttttgaggtggagtctgtctggttttcaaacaagagccaggaagacattttctatcccagcctgtgtccagtgggcacaagcaaatcccagattctcccactgaacctccccaatatgtctctacagactcttttcttcttgttctgatttctcatggcgggccccaggtccagcttggaatgtggggaggaggctccctcagccccacagccctgtgtagtggaggaagcttcacagagcgggaaggagcaagggttctcaaggtcaagttgcttctctctgtcaccaatgtgtccctttctgtcacctctttgtgttcttttgcctactccatgagctacaagcaacattcaaggctttgaaacaagctcatacttttttcccaaatgagagaaggaagccccttgggtgagggagacacagctcagactgctccctgctctgctctgggctcccctgggtgactggccttgcctgactccacctaggtgggaacgaggtgtgtggagaaggagcccgggtggtctgtcctgaattcggctaaatcaagctgccaatcaacaccaaagcttcccttcgtcccagtcaggctgcaggaaaatggaaagagagggagcctcagggcagactcctgagctgcgtcctggctctgatgtcaccagctatatgaggctgtgggcacagcacatgggacacagcacaggggacagcaagtgacccacacttggagaaatcaggagattcaccacaggggctctgcacggcagggaatggcagtgtcaaaaatcgtgtgtttatacagatggtaacagtacatatctaacacaaacttaccatcttaacttttctacacatgcagttcagtggtattaaatatattccccttgttctgcttccatcaccaccatctacccacaggactcttttcttcctcccaaaatgaaactctgttcccatcaaactcctgggcagagctgccccatctatggcccacagtctgatccctgacttgtcacctctagacatgctcctagtctcctgcactatttctgctcaaacatccatctccatcatcacctatctctaggatgtccttaaatagcaaagcctcagagcaaacacaacttggctgggtggtgtgggactgtgcagctggaagaaacgcagctccttcaaattccaggtgaggaccccaatgggccaggcagccagccagtcaggaaaggaccagaagtgctgggggctgtgacccccagccctgtgtctgtccacaacccaatgctactgcccaattcacacttgagaaagtctgtgcttctcccacacaaaacagccagcctcatggtctctgagccctcagatcattgtgcatctgtcttgtgacgcacacacacctgccatgagcttttaaggactcagttgggctgagaggtgggagatgccaactctgattgatagatgcccgtggaggaatcacaggtgccacacagggcaatcttctctctgttatctgcacagcagagccacccaaacccttcatcaccagcaacaactccaaccccgtggaggatgaggatgctgtagccttaacctgtgaacctgagattcagaacacaacctacctgtggtgggtaaataatcagagcctcccggtcagtcccaggctgcagctgtccaatgacaacaggaccctcactctactcagtgtcacaaggaatgatgtaggaccctatgagtgtggaatccagaacgaattaagtgttgaccacagcgacccagtcatcctgaatgtcctctgtgagtatcttctgttcctctgtggctcaggctgccagcccaaatccacatagccaaagtccaggcctctcagtccctctcaggcccaaggacagagacttttacccctggacatccaggctggccctacccccagcaaatccatgcaggcccagtcctgaccaagaataggaggggagggtctgctcctgtcctgtaacactcgggatccacagctagtgatgggagaaacagatgaatgtctcagactctggctaattggatacagtaggggtttggttaggacttcaggattgtgacttggctcagggggacactgttgccctttcacagaccaggagcttcccctttgctctgatgacattcacctgtggccctattctctttgctccagatggcccagacgaccccaccatttccccctcatacacctattaccgtccaggggtgaacctcagcctctcctgccatgcagcctctaacccacctgcacagtattcttggctgattgatgggaacatccagcaacacacacaagagctctttatctccaacatcactgagaagaacagcggactctatacctgccaggccaataactcagccagtggccacagcaggactacagtcaagacaatcacagtctctggtaagtggatccctggaccgttagcaatatgttctggagcggaatctgtctggttttcagaaaagagccaggaagaaattttctttcctagtatgcatccaatgggcacaagcaatcccaaattcaatcctgagcactcccaatttgtctctacaaacactcttccccttgtttttctgatttctcatggctgaccttgtgtccaccctgagaaatgtggggaggggtcttcatcagccctgagccctatgtagtggaaggggcttcacagagggggaagcaagaagggtcctcaaggtcaagttgctcctctctgtcaccaatatgtccctttctgacaccactttgtgttcttttacctaatccatgagctacaaggaacaactgaggctttgaaacaagctcacactttttccccaaatgagaggaggatgccccttggatgagggaggagcagctcagactctgctcccggctccgctccgggctcccccagtgactggccctgccctgatttcacctggggtgggatccgggcatgtggagaaggtgctcaggtggcctgtcctgaatctggctaagtcaagatgccagatgaagccaagccttcccagggtcaggctacagggaaataagaagagagggagcctcggggcagactcctgagctgtgtcctggagtctgaagtcaccggctgtatgagattgtgggcacagcacatgggacacagcacagaagacagtcagtggcacacacttggagacacacagagattcacccatggggactcaacatggcagggaaggggcagtgccaaaaagtgtgtgtttatagacagggtaagaataccagccactatatatatctaacataagacaccattttaacctttctatgtatgcagtttagtagcattaaatattttcccattattctgctaccatcatcaccatccacccacagaactcttttcttcttcctaaaatgaaactctgttcccatcaaactcttgggtagagctgcccacctgtggcccacagcctgacccctgaactcacctctagacttgctcctggtctcctgagctatttctgcttaaacacccatccccgtcatcacccatctccaggatagccttgaaacaaaaggctcagagaaaacaccccacggttgggtggtgtgggaccgtgcagctgaacggaattcagcacccacaagtccccaggttggccaggccgtcagccatcagggaagaaccaaaggaggtgctgggggctgtgactcccagtcctgggtctgtccacaacccaacgctgctgcccaattcacacttgagaaagtctgtgcttcccccacacaaagcagccggccttacagtctctgagccctcagatcatcgtacatctgtcttgtgatacacacacctgccatgggcttttaaggactcgggtgggctgaagggtgggagttgccaactctgattgaaagatgcctgtgaggaatcaaaagtgccacacagggcaatcttctctctgttatctgcacagcggagctgcccaagccctccatctccagcaacaactccaaacccgtggaggacaaggatgctgtggccttcacctgtgaacctgaggctcagaacacaacctacctgtggtgggtaaatggtcagagcctcccagtcagtcccaggctgcagctgtccaatggcaacaggaccctcactctattcaatgtcacaagaaatgacgcaagagcctatgtatgtggaatccagaactcagtgagtgcaaaccgcagtgacccagtcaccctggatgtcctctgtgagtatcttctgttcctctgtggccctggtttccaacccaaatccacacagccagaggccaggactctcagttctcctcaggtccaaagaggcagactcccacccctggacacccaggctggccataacttcctgtcccaggaaaatttgggcaacctcagcctggaccaagaataggaggggagaggctgctcctgtcctaggaggctcagagtccacagcctatgatgggagaaacagatgaacgtctcagacccagactcagtggacatgagggttatggtttggacttttttttttttttttttttttttgagacggagtctcgctctttcgcccaggctggactgcagtggtgtgatctcggctcactgcaagctccgcctcctaggttcacaccattctcctgcctcagcctcccgagtaactgggattacacacacgtgccgccatgcccagctaatgttttttgtatttttagtagagacggggtttcaccatgttggtcaggctggtctcgaactcctgatctgcccgcctcggcctcccaaagtgctgggattacaggcgtgagccaccgcacccggccgatttggactttttaacacaggattgggacaggattcagagggacactgtggcccttctacaatcaggagcttcccctttcctctgatgacatcacctgtggctttgttctctttgttccagatgggccggacacccccatcatttcccccccagactcgtcttacctttcgggagcgaacctcaacctctcctgccactcggcctctaacccatccccgcagtattcttggcgtatcaatgggataccgcagcaacacacacaagttctctttatcgccaaaatcacgccaaataataacgggacctatgcctgttttgtctctaacttggctactggccgcaataattccatagtcaagagcatcacagtctctggtaagtggctccctggagcatcagcatcatattctggggtggagtctatctggttctcaccaaagagccaagaagacattttctttcccagtctgtgttccatgggcacaaggaaatcccaaattctatcctgagccccctcactccatctcggccaactctctcctccccggcttctctgatatctcacggctgacctcgggtccagcctggaatgtggggaggggcctcccttagccccagaaggcccccaatagtgaaagggacttcatagtccagaagaaagaagggtccttaaggtcgagttgctcctctctatcaccaatatgtccctttctgtcacctctttgtgttttttcacctactctgtgagctacaaggaacaaggaggctttgaaaccagcccacactttttccccaaatgagaggaggaagccccttggatgaggcaggagcagctcagactctgctccctgctctgcgcccggctcacccggtgactggctctgccctggctccacttggggtgggaccggggcatgtggagaaggtgtccaggtggcctgttttgaatctgggtaaatcaagctgccaatccacagcagagcctcccttgggtcaggttgcagggaaatgggaaaagagggagcctcgggacagactcctgagctgtgtcctggctctgaagtcactggctgtatgaggctgtggacacagcacataggacacagcagaggaaagtgagtgacacacacttggagaaatagggagattcagccataggggctctgcatgggagggaacaggcagtgccaaaaagtgtgtgtttatagagagggtaagactatcagccactatatatatctaacataaaacttaccattaaccatttctaagtgtacaattaagtgaaacagcataaatatcaatcaagtatattgcccggtgtggtggctcatccctgtaatcccagcactttgggaggccaaggcgagtggatcacctgaggtcaggagttcaagatacagaaaaaaaaaaatagctaggcatggtggtgggtgcctgtaatcccagctactcgggaggctgaggcaggagaatcgctcgaacctgggcggtgtagtttgcagtgagccgagattgagccactgcactccagcctgggtgacagagtgagactacatcacaaaaaaaaaaaaaaaaaggaaaaaataaatcaagtctttttatactcatgtctaaccatcacatcacactatccatttccagaactttttcatcttaccatactaaacctctgtacccaataaacagtaactccttctctcccctaaactctggtaatctccattctactttctgtctctaggtaatcaactattctaacgatcttacaaaaatggaattatataatagttgtccttttgtgtctgccctatttcacttagcataatgtcttcaaggttcatccattttgcaccatgtatcacaatttcttccttgttaaggttgaagaacattccattgtatggatacacctcatttttctatccacttatctttcaatggacttttcagttgtttccaccttttggctattgtgagtaatgctgctgtgaacatcagtgtacaaatatctgttcaaatcactgccttcaattctttttggtgtatgtccagaaatggaattggtagatcaaatgttaattcttttttttgtttgtttgtttgtttgtttgtttgttttttgagatggagtctcgctctgtcgaccaggctggagtgcactggcgcgatctcggctcactgcaagctccgcctcccgtgttcacgccattctcctgcctcagcctcccgagtagctgggactacaggtgcccgccaacaagcttggctaatttttttttttttatttttagtagagactgagtttcacagtgttagccaggatggtctcgatctcctgacctcgtgatccgcctgccttggcctcccaaagtgctgggattacaggcatgagccaccgtgtccggccccaaatgttaattatttatttaattttttgaggaaccaccataccattttccacagtagctaatatttcacatttctatcagcaatgcactagagttccaatttttccacctccttgaaaacacttattgttttgtggccatcctgatgtgtgtgaggtggagtatcattgtggctttgacttgcatatctctaagtgttagtgatgttgagcatatttgcatgtgcttgttggccatttgtatatcttcctaggagaaatctctactttagtcctttgtccatttattaattgggattttggatttttgtggttgttgatttgtaagagttcttcatatattctggaaattaatcccttatcagatatatgatttgcaaatatatttcccatttcataggttgccttttcactttctcgataatgttctttaatatataaaagtttttaattttcgaggccctgcacggtggttcctgtaatcccagcactttgggaggccgaggcaggtagattacaaggtcaggagatcaagaccatcctggctaacacagtgaaaccccgtctctactaaaaatacaaaaaaaattatccaggcgtggtggtgggcgcctgtagtcccagctactcaagaggctgaggcaggagaatggcatgaacccaggaggcatagcttgcagtgagctgagatcgcaccactgcactccagccagggtgacagagcgagactctgtcaaaaaaaaaaaaaaaaagtttttaattttcatgaagtccagtttatcaatttttttcttttgttgcctatttgttgttataaccaagacatgactgtgaaattaaatgtcattaagcttttttccctatgttttcttctcagagttttatacttttcactcttacatttaggtctttgatccattttaggttaatttgcatatatggtatcaggcaaagattcaacttgttcttgtgcatggatattcagctttccctatatcatttgttgaaaagactgtcctttccccattaaatggtcttggcaccgttatcaaaaatcatttggccatatatgcaagcatttctttctgggctctatattctattgctttggtttcaatatcttcctttatgccaataccacactgtattgattactgtggctttatagcaaatgctgaaatcaggaagtgtgagtcctccagcttcattctttattttccaggttgtttggctatttagagtcctgagattccatatgaatttcaggatatgtttttctatttctgcaaaaaatgtcactgggactctggtacaaattgcgttgaacctgcagctcactttgagtggtattgtcctcctagcaatattgagacttcccatccatgaaaaaaaaatgtctttccatctattgatgttgtctttaatttccttcagcagtgttttatagttttcagggtacaatcctttcacctccttggttaagcttatttctaactattttatactattttatgttaatgtgaattggaaattttttcttaatttccttttagattgttcattgttagtgtgtagaagtacaactgatgtttgcgtgttgattttgtatcctgcaacatcactgaatttatttattaactctaacaagttttttaatcttcagggttttctacagagaagtccaagttatctgaaaacacagatcattttacttctttccaatttggatgtctttttttttcttgcctaatttctctggctaggacttctaatactgtgtcgaatagacgtggcaaaagcaggcattcttgtcttgttcctggtcttacagggaaagctttcagtctttctccattgagtatcatgttagcattgggcttttcacacattgcctttattatgctgaggtggtttccttccattcataattagagtgtttttgttgtgaaagaatggtgaattttgtcaaatgcttttattggttctatctaattataggcctattaaatttttttgtgtttccaggaatttgtccatttcatctaggttattcaacagtttgttggcatacaattattcatagcattcttgtagtccttaatatttctgtagaatttgtagcattggtagcaatatctccattttctttttttttttcttttttttttttaagagacagggtctcactctgtagcccagcacaagctagagtgcagtggtgccatcatagcttactgcagcctcaacctccaaggctcaagtgatcttctgccccagcctcttgagaagctgggactacagacatgtgacaccaagcctggatagttttttaaagaaattttgtagacactgtgtctgcctatgttgcccaggctggtcttgacctcctgacctcaagtaatcctcttgcttgagtctcccaatgtgctgggattaaatgtgtgagccgctatacctccattttcatttctgattttagtaatttgaatcttctctcttttttcttagtcaatctaataaatgattgtcaattttgttgatcttttttgaagaaccaacttttggtttcattgattccttctattgtttttcaattttccattttatttatttaaactctaatccttattatttccttcatgtactatctgtggtttgaggtggttctttttctgtatcctgaagttgtaaagttaggttgttgatttgagatctctctttatatttaatgtatttaccattaaatttctcacacaagattcttaacttctctgagccttcaattcttcaactgaaaattgtaataattctcatcaccaggaaatggaggaaaaatgaaaattgcaataagaatgactgtttaacagtattgttttaaagatttaatgtaatattcgattaagctttcagcaaaatgctacacacagagggaaacttcataaatattagctgctattatcactactgttattattagcttgaagttaggcagttctagagccaaatcctagatccacttctcactaattatatgactttggataagttttttcaccactccaagtctctgtcatttcatctgtaagatggaaatcatgcctacccaacagggttattgtatggatcaaatgagatgccagaaaagcatttacagtagctaacatagcattaatcatcagcctgagttgactagtgagagccaagccccaaatgaaaacccactaggacatggttactggctaaaaatgggggagagaaaaaaaagttaagtgcaaagaatcaagcctggtatgttagttttcatccactgagattcagccaagatggaattagaggtgcaagataatttaccggggggaaccaccatgaggaaaagtggagtagaagtgggaggagcctgagagagccctcagaccacgatgcagatctgattcctgagaaggagaaagaggagagagttttagatagtgatgcagttctcagagtttccacaaggctggtggggcgtcctcaagcccctcacccatgagagagaagcagagtcccccagaactgggcttttcattcccctggtgggagcccatgagaagcgagttctctgtgcaacggacttagtaaatacagaatgcactagcctgggccttctgccaatcaagtccctgccacagagacccaacagacttatttatgcctaccacaactgagacactgagaaaaagatgcaaccatgaaaagatagaaagttctaatgacacgcaaaaatagcaatcagactttctcaaatttcaaagccttcagaaatagctgagtgcagacaggccagggtggaattgacagaagactgatcaccaactagcaacacagtgagagagaaaaaattgcaactttcccacaaaactaatgcattccttgaagcaacaagtagagactgcttcatgctgagagctggaacctggggcaccccactgtaaaataacatcacattcattccttctcttttctttccatgacggacgattcagcatctggaacttctcctggtctctcagctggggccactgtcggcatcatgattggagtgctggttggggttgctctgatatagcagccctggtgtagtttcttcatttcaggaagactggtaggtataatggcctttcctcttgttctgtttcctgcagtgctgactgccatgcttgggagagggaagggatttcttcacctgtatctgggactggatctcttcctcctacccccaagctcctgcttctcagcactaattcctgcaggtctcttcttccctggtcttcatgctccctgtacgccactgtctcttagatataattatccccaccctctgctcatttgtttcccagattcaatacattgtcaaagcctcttggtccttttttaacatctcacacttgtgtcattctctccattcccataaacctcaacaactgctcaaagtcctgcttgaccccttgttgccagtctttgaaatctttcttgcatatgactgcctcattaccttcctaaaatctagttcactcgcctactcaagaagacacaggggcctactgtggtgtattagataagttcacatttcttctctttactaatcttttttacttcctttaccaccactcccttatataattccatcatcctaatagatctgtttccctacacatccctgcctctccaccccacatgtacacagaattcttagttccggtgttacacctaaaaacatgtcaaacagggtgacctccttccactgtctgcactgtggagttacccacacccttaatcacaagcaacttctgacctcatgaagaacaaagactgtagcattaacctgtgagtcttaagctcaggacacaactgtgcctgtgactgagaaccttttcctgataaccaattcatatgttcataacagatacagaaatgaagaaggcaaggtccttaattctataacaggagacaaaacctgaaaaataatcataatgccaaaatagaaaggagtgaacatcacaagaaattagagaaatctgacggaaaatatagctacacattggaatcactcagaaacattttataaaatggatacttaagtcccaccgataaattccgatttactggtctggagtgggacccaggcattcgtaatttttaagcctccccagatgctactaatgtgtagccaggatggagaaaccctgttctaaataggtaggacttggggctaaacccatgactttcagctaggaggattagaattgcccatggagtttttctggctgggcacggtggctcacgcctataatcccagcactttgggaggccaaggcggacggatcaggagttcaagaccagcctgaccaacatggtgaaaccccctctctactaaaaatacaaaaaaatcagctgggcatggtggcacgtgcctgtaattccagctactcagaaggctgaggcaggagaatcgcttgaacccgggaggtggagattgcagtgagccgagatcgtgccactgcactccagcctgggcgacagagcaagactccgtctcaaaaaaaaaaaaaaaaaaagaattgcctgtggagtttttcaacatacgtaagcctatactttgttggccctgttcattaatgggctccaccaggaaattaggaatctagttgagaaacagaagctgaatggaaaggccaccttatttgatatgttaaattatatgggaagcactgtcaaatcattagtgatgttaaaccttctctaagttatatttatgagtatgttattgatgtattccaaaagttatataagaaattctagaaatctaattggttatcagccataatgtcatatgccacagaagtaactaaatttctatgtgagttgtgttcttattataataaattatcatcagatttttaactgtactcattttaaatctttgtcattcacagacagttgttttgcttcttccttaaagcatttgcaacagctacagtctaaaattgcttctttaccaaggatatttacagaaaagactctgaccagagatcgagaccatcctagccaacatcgtgaaaccccatctctactaaaaatacaaaaatgagctgggcttggtggcgcacacctgtagtcccagttactcgggaggctgaggcaggagaatcgcttgaacccgggaggtggagattgcagtgagcccagatcgcaccactgcactccagtctggcaacagagcaagactccatctcaaaaagaaaagaaaagaagactctgacctgtactcttgaatacaagtttctgataccactgcactgtctgagaatttccaaaactttaatgaactaactgacagcttcatgaaactgtccaccaagatcaagcagagaaaataattaatttcatgggactaaatgaactaatgaggataatattttcataattttttatttgaaattttgctgattctttaaatgtcttgtttcccagatttcaggaaactttttttcttttaagctatccacagcttacagcaatttgataaaatatacttttgtgaacaaaaattgagacatttacattttctccctatgtggtcgctccagacttgggaaactattcatgaatatttatattgtatggtaatatagttattgcacaagttcaataaaaatctgctctttgtatgacagaatacatttgaaaacattggttatattaccaagactttgactagaatgtcgtatttgaggatataaacccataggtaataaacccacaggtactacaaacaaagtctgaagtcagccttggtttggcttcctagtgtcaattaaacttctaaaagtttaatctgagattccttataaaaacttccagcaaagcaactttaaaaaagtctgtgtgggccgggcgcggtggctcacgcctgtaatcccagcactttgatccgccgaggcgggcggatcacgaggtcaggagatccagaccatcctggctaacacagtgaaaccccgtctctactaaaaatacaaaaaaagttagccgggcgtggtggtgggggcctgtagtcccagctactcaggaggctgaggcaggagaacggcatgaacccgggaggcagggcttgcagtgagccaagatcatgccgctgcactccagcctgggagacaaagtgagactccgtcaaaaaaaaaaaaaagtctatgtggtcagtcactactcttgctgcagttatgaaaagaatgaggccaagtctgatgaaaataaacttattttgaaaacaaatttgtcttattgggattatctttggtagaaatagagatgcctatgaagagaaattatgttgaaaaaaaactatagtacacctgttatgagactgtcactttgtacattgttgagtttttattatccacctgtagactagagtggaccatgaattcttccactttcttcaatcccattttctaccatggaatcactaagagcaaagtctgctctgttcctgaagctctataagctacagatggataactcaatgtaaatttcatgggaaaacactcatgcctaaggtgtgggccactcagagctcaccagtatgttcaacactataactagagacactgaaactgcaaaccaggacaagaaattgacaacttcacgctgtagacagctttccccaagatgtcagaacaagacttcctaccatgatgaggctcctacccctcttaatttgtcctagctcatgcctgcctctttcacttggcaggataatgttgtaattagaatttcacaggaagtatcttctgagggtagcttaacagagtatcagatctatgatatcactaccaaatttttacataagagatcctttagtccactcaacggctgacattagcagcatctttaatacaactgtttgttcaaaggcaaggtggtcccttttaaagttacacttctagactcacctgttctcactccctgttttaatgtaacccagccatgagatgccagataatagaattgctacctactagctgaacaggaaagaacctgtgctgattctgacacttcttgttgcacatagataaatacaatgggtattatagagactcagttgcagaaattaacaaacatgctgcttggttaaaatgggtagactcatctggctcattctttattccattttagttggtttgcatcttgcctaaggtgcatactccaaactcttggtattattctcctgatagtcacactagtagtctccctggtgtgctataatctctaaaagctttaaatgtttgcatgcagctatccatcgaatgtcaaatggtctctctttggctggaatgacaaaactcaaaggaatgtgtgatcaggaggacatcataacctatgaatgatggaagcccaaaatgatggtagctgagagtaatgtcagtgctttcagttttggtcacactctcacctaagtgagagcatagagactccaaatagggccactgatgctaaatgttacatactccaactgaaattttaagaaagcagatagatcccaaaacagaccaatttaaaaaaataaaataaattaaaaaataaaaaggccaggcatggtggctaacgcctataatcccagcactttaggagggtgaggcaggcggatcacgaggtcaggcgtttgagaccagcctgaccaacatgatgaaaccccatctctactaaaaatacaaaaattagctgggtgtggtggcacatgccctgtaatcccagctactcaggaggctgaggcaggagaatcacttgaacttgggaggtgaaggttgcagtgagctgagattgcaccactgcactacaccctggatgacagagtgagactccacctcaaaaaaaaaaaaaaaagaaaagaaattccaatctacttaaattaacacaataaggaggtcccctttgctttaatttttataaaaaagtaacctgaattaaactgatgttaaccaatatatttatttctactgctctcttttcttgttcaaatttgacaaaacccactgttctgttattgtatggccaaaggggagttatcactgtatttgtaaagtgggacctgccccaaattacaaatcccaaataaaagccaattagatttataaataaagctgttgtaatcgtgtctcttgatacgagttcacagccagcgatggccagtggagtctctcaggctgcgtcattctcaccctgaccctcctgccttcctctttcacttacaaggacccttctgattacactgagcccacccagattatccagaataacctcccatctcaagattcttaacctcatcacatctggaaagccttttgccaaataaaagtgttatgcactggctccagggattaggatgtggacatttttaggaggccattattctgcccaacacaggtaccttttataaacttcacccacaacaaaaatttgctttgcctgtcttctgtgtctcacttttctgtctgtgcacaaagtttaaggtgaaacacaccagctctgctgtgaactggctggatgaccctggaccactcacttcacctccctcagcctcttctcatctgaagcacaagggtgattcttactgcatcagaaaatttacatgaaagggtaaattaagacgtgtaaggcattagacacagagcctggtacctgatgagccctcggtaaacattcctttcagtcctttcctttcaccatcctatttctgtcaccctcatccatctgctccttcatctcctttctcttcagtgacttactcagtctaagctgccagttagcaaagaagccacacttcccattctctcatgattctgctggaatgttcttgtgataaagtctgttatccacacgagacagcccacattatttatatggagaggtctagttaaaacaagtcctttttatgttcacgtaaaacctatacatgtttcctcttaatttacacataccagtcccaattctgccccgttaatttatacatgcactttcttgttttcactcttcttcagtatttctctttacactttataaatttggatagtacagagacaaaaataatgagctgggccaaaagagaggattcctttagcaagatgaatgctttcctttaaaaagatgaatgctttcttttgccataatgaatgctaatttgcaaggcactcctgaaacctgttcctaggattggcttttagagaaatcatttgactctggctgggcgcggtggctcacgcctgtaatcccagtactttgggaggctgaggtgggcggatcatgaggtcaggagatcgagaccatcctggctaacacagtgaaaccccgtctctactaaaaatacaaaaaattagccaggcatggtggtgggcgcctgtagtcccagctactcaggaggctggggcaggagaatggcgtgaacccaggagacggagcttgcagtgagccgagatcgctccactgcactccagcctgggcgacagaacgagactccatctcaaaaaacaaaaaaagaagaagaaaaatcatttggctctaggacacattctagaccccaggaggtaataacagtgacagaagccacatccactcttagtatgcctgctgcattttcacagaatgttgtgcatgaattactgttccccaatccttccactcctggaggttaagcctcccccttcaacatcttcatctccagctggcctgccaggactatggctgggaaatacctccccaccttccatgcccagggtggcacctttgcccattcccataactataatagctcacactgatgcagcactcactgtgcaccagcactatcctaagagctttctagctagctacagtcctcgccaaaaaatcctgagtgttatcatccccatttttacagattaaaaaaaaactgaggcagagatgtgaagtaatgtacccagtgtcacccaactcatttaacctcatcctccactttatctgggaagaggacaccctaagatttccaagatgtcctgaataacatccaccttccagaatggtttttgccccctctactctcaggatttgacaaacagccagtatttcgttttctgtcttacccttcacttatgcacctgttctctaacgccacactcacaactgcacagcccggaataaaagctggcttttacggacctcaatctctttgggaaaaaaacagggccaggttcccagtcatcataaaaagtcatttgtactctattgtcaactatttgcacagccattccctggccataaatgatgtatagtaccaacaataagtgtaatgagaagaaagcaggaaaagcatgagttcctggaatggtcacaaagaggagaagatttcaaatccagaaacagtcataaaacacacccagagtgtgaggcctctgagcaatgacagccccacctgcctctttccatggctggtggcctctgacttccttctcaacctgccccacccggccttgctttattaaaccgatactaatagcttggaattggggccagaccagtgcacacagcactgagtggtggggtggaggagctgaaaagggagaagagtgtttgacttatgaagacctgactcacttaggtacacatcacctgggcgggaaatggtttagtgaagggctgtgcagaactcatggtgtttatccaaaatgagtgactgaggcaagtgtctaaattaattgtttattgagccagaccttgagggtacaccctaggaaaacacaagtcacagaaaacctctgtggcttgtgttctctctgaagaggttttcaggaggccttaaaggggggaaggcaggtaggaagaggcgggtaggtggaagaatgattgttcttgtctttgttctgtgcctagaaagataagcattatcagcctgaaatcctaaggactaagactaaagccttaggaaccagacttagatttcagaactgaagatacaatcgacatgtccttgttatatggggggatatacatcttaaaaattttaaggccagcaaagaacaatttgtgagggcagtcatccagaaatacctaaggccttttgctttcctatagaggtctgtttaatgtacaatgttttgacacaaggttttatagtaacagcgatccatctggggaaatgatgatgatgttgcatgactcagtctcaaagcttaactttccctttgacctaaagagagtcctgaagtttttctttccctttacatttacctgctacctgacctgctattctctctctctctctctctcttttttttttttgaggcggggtctcactgtcacccaggccggagtgcagtggtgtgatcatggttcactgcaacctccacgtcccaggctcaagcaatcctcctacctcagcctcccaagtagtatctgggactacaggcccatcccaccacactcaactaatttgtgtgtgtgtgtgtgtgtgtgtgtgtgtgtgtgtgtgtatctttttgtagagacagggtttcaccatgttgcccagtctggtttcaaactcctgagctcaagtgatccacccactgcggcctcccaaagtgctaggattacaggcatgagtcgctgcacctggccaacccctgaaattcctcaaaatctttcagagaaagcattatagaagatacgagtttgtgattgtatgtttcatctgatcctacatcaccaggaaagctcattcctaggaagttgtgtctcatggagaagggagtgaagttgcatcagaaaaggaccgaagccaagttacaggaacaaaaggaaagtaattgtggagccctatttgggctacacagctgcctcttcaattaaagcaattctttgagcaatcatcaccctaaccgtttcagttgtatgttggttcgatcgtaatatctggagcagtctatggactagtttttctagagcctctgaagctccttgagattgcagtggcagatttctctggattgtagtttgaattagatgttcaagtgaaccttttgagtagccatacatcagcaggcacaaaggttgttgttatataagttgtaatttctcctgaaattcacttaagttgtctagcttcaggttgcagggctttaggaaaaagcacagttttaatttctaatgattccaagtcagaaaaacagaagaaaaatttgaaagtgttattttcaagacttgtagccaggaaagaattcaggattcagtacaaattgtaaggaaataacaaaactcaaaaacaatgagcaacaccagaatttaataacagctgtactgtagtttcttctgaaacataatgttttctgtctccagttctccatttttacaaaagccaaattatagtaggacccaaattatttgcaaaataagttttagtcttatacttggcctgaaattttcattttggaaagtttgtcaaatatcaaaggtctaagacacttgttcaaaattggtcataggtcactataaaatcatagttattaatttagccaaagtgataattcaaaaattttaagagggaaaaatcttcatttttttcatttatgtatttatttatttatttattgagtcagggtctcgctctgtcacccaggctggagtgcagtggcaccatcatacctcactgcagccttgaccttcagggcttatgcaattctcccaacccagccacctgagtatacgggactacaggtgcatgccaccgcaccttgctaattttgttattgttgttgttttttgtagagacagagtctctatttgtggcccaggctgatcttaaagtcaggtgggaactgaacaatgagaacacttggacacagggtggggaacatcatacaccggagcctgtcatggggtgggggtaggagggagggatagcattaggagatatacctaatgtaaatgacaagttaacgggcgcagcacaacaacatggcacgtgtatacatatgtaacaaacctgcatgttgtgcacatgtaccctagaacttaaagtataatttttaaaaaagggaaaaaaaagatgccacctgtgttaattagcttaggaaaaaaatagacaccaaggtaacacaaaatgatagatatttaccttaggattttatgaggagatttattttctttagataggtcacttttgatttagggtgtgttttccaactggaccgctgagctcaagatggagcccagcagggccaacaaattatttgcagtttgtggggcctaataatttaaatatgggaaaagtgggcacagttggaaagcagagcatttagatctttaaacattaaggattccactgaaccccaggttccccaaaaaaaggaaaatgcaaaaaggaccatgctgtacaacccttccacagttgtactttgctacaaaggcatttttctaattgtttaaaccgtgtctttcttatcaaaacatgcaaagaaatgagtagccttctgaagtaataattatttattgtaaccactgtcagtcatctccaaaactgtagctctcacccctgacccagcagccatcacacacacaaggccgagtatttttacagtacgatgcaatctctgatgcctccagaagccaaaaacatcagataacacaacagaaaagagcagagtgttagacctgagagaaatctggtcacttaaaattcctgaggctccatgaggaaaaacagactttttttaaaaaaaaaaatattttaggtaccttgttatcagattttagctgggacaaacaactgctatttctggtttttgaattttttttttaaccaaagttgccctcccaattaaaactaataaggcttaaccagggttgtgacttaaccaaggatgtacaaggcatatccaaatagatgaatgagccaggcacagtggctcacgcctgtaatcccagcactttgggaggccgaggctggcagatcacaaggtcaggagatcgagaccatcctgactaacatggtgaaaccctgtctctaccaaaaatacaaaaaattagccgggagtggtggtgggcgcctgtagccccagctactcgggaggctgagccaggagaatggcatgaacccgggaggcagagcttgcagtgagccgagatcttgccactgcactccagcctgggcgacagagcgagactccgcctcaaaaaaaaagaaaaaaaatgaatgagtactcccaaaaaaatagtccaaaatcacagaaacataaaaccaaaagggactagtttcctgactagaattaaacccaggctgcagtattaaagcacagaattttaactattagaagagaaggtggagtgccttttattcgtattttctcaggagatctatagcaagcagtttgagcttacaaaagattttaactttgttttaggtcaaatttttgtaatttactcaagagaatttttaaagctagctacaacactatgatgcgtctttttcttttaattttatctttccatcacctatttaaaataaaagatctccaaaatctttttttaatgtaggagtccaatttaaaggatccatcttctggccattagtaattagaatttccaatggtgtactgatcccaataatgaatcaacccagcagtttcttcagtgatgaagcaatcccaaagatctgtcccctcaacaaaataaaatattcactcccaggaatagaacaggacagcaaaagacttttgtttccatagcactaaccaggcaacaacggttggaacaacaaaaaccccttatagatgggacttcttataacaaatcctcctgggagttcaactcatttggaacaaacaaaacaaaacaaaaaaatctcaggtcccagtcattctcaggctgatcacctgatatgactcaaaaatcacacctcccagatggtggggaccaagagcaagtgctcccacttggtcacaaatgaagccttcaaggacataaaacaagatgagagggaattttatttggtacccttctttataaacaacacagaatgaaagagacagaggaaaagactatttctggaaggaaagggattaaacaatataaatattcatatggaaaaatgcaccaaatactacaccacaatctctacacccaggctagtcatacacaaatcttctcccattaaccaaaattttgcagagaaaactgatttttcctgtctgcttgaccagattgcacagggagaagccaggagcctcgctgataataaactctacccttttggtggttgatcattttcctggattcctgcatggccaaaaacaggttatgggggtaaatcaggtttaagtagcaagacaggttattcgagggagaaaggaggaagtctggctaacgaagatggtcttgttatatagatgaaacctcacaggtagcagccctcagagagaacaaatggtaaatatttcattcaggtctttaaggtataaggctcagttcatttttcccagatccagacaaaagaaagcctgtctgtattaatggggattctctacagatgccaatttttcacatgaaagacagctttgcaggccacttctgcctgctggccctctgacagacatctcaaaatatgtcaaaaaatatatttttgggtacaatattcttatttcgttcaactgacaggtgattcccagaggtagaacttgatgttctgcagttgcaggggttttagccaattttgaggccagctcaccataatgtagagctcctgctggatttgaccaagttggaaggtgttttggacactagacagggccaagagttggacaaactcaaaggaagaatgacaaaaaccaaaaacacaaaaagtgattgcactttacatattacatattgttgaacactgtaagcatgaggagagattaaagcaaactagcaataaactttgacctgcagctaccacattttaaaacaaaaccccaacccagctctttatctcagaggggaccaagctgaaggctgctctccattgtcacaggagaaggcaactcaccttccttataggaagtgagcaaagctgcatgagtagaggagttccatggcaaaacaaaactcggatctcaaacaaaaaattgtggggagcagggacctcaagagggagtaggatccagtccttggaaagtcacacatttggtcagagctaaagctcgatagttggtactgagcataaacaggagaatcgctgcaggcctaaggggctaagctccactcagaggatcccttcatggtcaccaaaatgttaaccaaaatgattgactgaggcaagcaagtgtcagtccattgaggtttactgagccagagcttgagggtgcaccctggaaaaacataagtcatagaaaccatctgtggcttgtgttgtctttgaagaggttttcaggaggcctggtatttatacttctccttaaaagggggaaggcacgtaggaagatacaagtagaggaaagaatgatttgtctcatcttgtctttcttcttggatagataagccttatcagtgtgaaatcttagattgcaaacctaaagttagtattgacatgtccttgttttgtggaaggatatacatcttgaaaggtttcaaggccagcaaagaacaatttgtgaaggcagtcatctagagatgcctgaggccttttcaccttcttgtgggaggtctggctataacgtacaatgctttgacacaaggttgtgtagtaacagttgttcatctggagaaaagatggtggcattatgtgactcagtcttcagactgaactatccctttggtgtaatgagtgtgacatgagatttttattttcccttacataattttaggagttgtacttccttgatgctgtctgactgaggtcaaaaggatgggtgtggaaggcatcacacctttctcccatttagaaatccattgtcccttccttctcccttattgggttacattcctctgtccatagatcacgtatttactgagttgttttccacggggaaaaaaatctcaattgaactctttaaagctccaagcatttaattcagttcaagagtgtctctcattttaatgatgaccaggcacaaatatttttaaaacgctctccagaaaattgtgataagagcctctgcacaacccacagtagctttggagagcactgagctacaaaagtgatggggaaggaacctgctacatgctgggacctttatatttccaccttatctaatgtccccaatgatgttttaagtaggcactattatcaccctatcccaagacatcaattaacttgtcctttatctcagaattggtcaaaggtggaaccaggattccgactcacatatttctgaatctaaaggtcttgtttcactgcagagcgattgagcgtacatgaactcaaagaaagacaggatgactgattctaacagaaataaccacacaggcttcaatgaagagtcagggtctgaaacgggccttaggacaaagaacagctcaggaggctgagaagacagttgaaggtattgcgggaaggtgtgaaagaattagaataagttcagacatgaaaacataaaatgtgggtcaagtctttctacacagaccaagggagtagactggggctgtgttatgggggctttgaatggcagcctaaggaattggaacttcatcctatggatgataggagtcattggaaagctttgagaaggtcagagacatgacaaacagcatttccaggaagattactctgacagtgtaaccaaaaagcagattagttgcaggctgcatgtagagtcccactaaccaaagcaaggtctgggccgggcgcggtggctcacgcctgtaatcccagcactttgggaggccgaggcgggtggatcacgaggtcaggagatcgagaccatcctggctaacacggtaaaaccccatctctactaaaaaatacaaaaaattagccaggagtggtggcgggcgcctgtcgtcccagctactcgggaggctgaggcgggagaatggcgtgaatccgggagacggagcttgcagtgagccgagatcgtgccactgcactccagcctgggcgacagagcaagactccgtctcaaaaaaaaaaaaaaaaaaaaagcaagatctgatacaaaaaagtaactttattccaaagctagctttgaggaaggggcacaaagcattctgcctttaaatttgctgcttcgcctttggagcaaaaagcaggtatttttataagttaagagaggaaatgagcgagaatgaccaacaaatgagcaaaagagaaaatgagcagtagataactgtccggtcctcctgctactgggcaggtgtctcctgggcagcagagttggcactttcctggacagaagtaagttataaaaacagtcacctggatatgcttctgacgcaccctccgaaagtgtgtgagttccgaggtggcccaggatggaagttctaaggcaatcccctaaagatgaaaggtccatggcaggtatgctatggtctgctgatcaactgtcaactcttgaggagagacccgtcatggagcacctatctagaagaacttgccccttagggagtgtctggtgatgggggaggtgaaaggttatatatacatttctgaaggactaagtaggaaacggggtgccggaaaaatgagaaaagagagggaaataattaaaccatctctagaaaaatagaggtactcacttccagttttccactgccaagctttattttatctttatgagatatgggtggcacatatgttctgcctgctttttgctgaaagggggcatagtcattggacagcagaatggaaccaatttacttggagttaaaaatatttatgagtacccaggcttatagatgatataggttggagcattatgatgtgaggtctagaaggtctcttggaaagcctgccttgtatttttatatagaggatgtaaaagcaggaagctccaaaacagaggtatattcctatccctgcaagcagggccaatattacaagcagcttttgccactaggatggttctgacccaaatcaggacactacccattggtgtagcaacaatgtggggctatgagaaataaaataattatttctgttaaaataattttaaaaattaggccacctctagaaaaataggggtactcggttacaacagtcttaggcaagataacaagtggttctgaactctggcaacttaatagaattatctggaagctttcatctttttttttttcttttttttaacttctcattttgaaataatttcagactttcaaaaatgttccaaaaatagagtccccatatacttttcactcaacttccccaaatattgttttagataaccacagtgcaaacattaaaatcaataaatgatcactgacattgtacagtaaataaattgcagaccttattcaaatcccttttatcttcccagtgatgtcctctttctagaccaggatccaatccaggatcacacattgcatctcatttttctgtcctctcagtctcccttaatctgggacagttcctcagaatttcttttgccttcatgaccttaacatttatggagagtattggagttattttgtagcatggccctcagtttgggcttttctaatattttctcctgattaaactcagattatgcactttaggcaagaatagcatagatatgatgctgcgccttctccatgcattgtattaagatgccctaagatgcagatatctctgattactggagatgttaactttgagcactgggctaaagttcctccactgtaaaatggctattttctttggaagcatttttaagtgaccaataccccaggccacactatggaccaatcaaatcagacactcctgggaaaaggcacaggcattggtaggttttaaatgccctacagctgactgtaaccagcatccaggattggaaacccacagcttagacagtgaagattagaatcctggaaatcagtcaggaagccattctttgggcctaacatccagttccagacacaacatttggcatgggcccatggtaggggaatggaaggccaaaaatctcctgattgggaaaatgatgggtgagtagactgctgtccaataaaaatagaaggcagggccaggtgtggtggctcatgactgtaatcccagcactttgagagatcaaggcagccagataacttgagctcaggcattcaagaccagcctgggcaacatggtgaaatcccatttctacaaaaaaaaataatagccaggcataggtaatatgtgtctgtacttccagttatttgggaggctggggtgggaagattgctagggtccaggaggttgaggctgcagtgagccatgattgcaccactgtgctccagcctgggcaacagagcaagaacctgtctcaaaaaaaaaaaagagagagagagagagagagagaaggcaaaatgctaagtaaggtgtccagcccttctggagtattttctctccagactatagagaaacctgtattgtagagaaagcacacaccataaaatttaactatcataagcctgatgtgaactcctaattgccactaagaagaaggaaattataaatcatgtgatagaaatatatgaccacatatgcagagatgcacacttccggatacagttgaatgaaaaattcacagaatccacgtcagaggtacaccaccccgccctccccacttggtcctttgtccttaatctcttctgaagtaagagaacgaagactgttgtaaatttcacaaaatagggaagtgtacaaatctcctgtcacctggctgtttaagcaacaggacactgtgctcaacttccctagagttattatcttgggttctccataaaggaatgccatcaatcctctcttcagagggaccatctaataacatgcaaaaggaaatgccaatttcaccaaaacccagaggcaggaaggaccctgacaggaacaatccctaaggtattcacatgcctgccagggtctggtgcagctggtgcaggaggaactgctgctggcaatagctggaaaaaaaaaaaagggacggcagctctaacactcagggggtagtaagaaaggagctcactcaattcaccttcagttctcacacagccaatacccttccagcctccctgtggggcctcactgggaggactggcacataattaaatgccaatacatgggtaaaataatttacagaagggtgggatcaactgggtcagaaaaggttgaagatttcacaaaacgggaaggatttgggttaggccccgaaagactcagccttaagaaagcagacacaaagagaaacagaagcccaagaaaagcatctagccttcctggccaattttctattcagacttcagagagacctttatcgtagtgaaagcaaatgtcatataaatttactatcctaagcctgacatgagctcctaattgccacagatgggacggaaattatgaatcgtgtgatagaaatacacaacgcacgcaaagatacacactttgcaccactctggatgcacaaagatgcacacaggccccactggagatgctagttttgaagaaggtcccaggaagaagagtgggtttgcagatgttattttatttgctcttctcaaacaccatatggggatatttcacaaggaggattctcgtcctcagaaaggggaagtaacttgccaaggttgttggtggatgtgggattagaacctcagtgagtctaacaccggagcccatgccaccaccactaccaccgagagccctgaacagggtatgtgtagggaacaggtaggagcagagagagttaaagcagaaagaaaccattttaaaacagggaagttaggtaagcttgctaaatggggatcatatgttgcagaggcatgaacactagacagtcgtgtgaacttgatcttctgattacagaaaagacaagacaaaagagggtgtgaaaatggggttctgggttcctaagctaaagagatgccaccaacaacagtgaaggagccatgagatgtgtggagaaagaactggatggagaagctgaagccctgagtttaaatgcaaaaagtcataaagtaagggcatggctgtggagggcaagttatattctctctctgcagtttggtatctcttcatctataaatcacatggagtgagaattaatgtctaaatgaccctcaacccttgctactcaaagtgtggcccaccaaccagcagcaacaacatgtccaaaagctcctcagaaatgcagaatctcagaccccaccagaaggatcagaatccgtattttaacaagaacttggggtgacctgtgagcacattaaagattgtgaagcagttctccgaaatgtcttccagttctaaaatgcagtgatttcacactcatctgaactttgtcacctcacaggagaaagaaggaaaatggcatttacattttacctcgttcgtgaccttttcttaatcctaacagcctcttagactcgcccgcatctgggtagaggttttagaaaacaccagagaggcagggctgccaccttgtgactatcatcaggaaacgcacttaactcttaaccagtctcaccagtcaaggacgggacggggctggagcagagagggtatacgggatgaactccaagtcacagatgagataagggagttataaccacccacaaaggctggaagtaactgtcagagggggctcagcctgcatcataaagcaatgtccccttgcaaaggacagtttttataatacttactatgtgatatcagtaggaaatggttccaggtcaagctctgcccttgtaaccttaaaacttactctaacaggtattttcaacatcagcctcagcctgaactctgccagtaaacttgtaactttccaaggaaacttactctactgtaacagttctttttcatccggagacaaaatgtatctgattcgcagtcaccgatcctcacactactctctgtaggctgaataagtctaacagcttttcatacaactgaccttcaaatattggttaagaaaaaaacaaaaccaccatgtgctgcccataccaccattccttggccgtttcccatgtggggtcacctgaagccccacaccctctgatcacgttccaatgggcaagtgaagtgcagtaacaacaacagacactctgaatcctaggagtgtccccagagcagcagagccacaggacccccgtccccgtcctggcgcctcaccgctacctagaagccaaatgccacatcagctgatctggggacgctgacttctcctgcttatgccactgctcagtcatcccacacctgtgcaggtgtctactttttattcagttttatttgtaagaaatatttatctgaggctgggcacagtggctcatgcctgtaatcccagcactttgggaggctgaagcaggtggatcacaaggttaagagatcaagaccatcctggccaacatggtgaaaccccatctttactaaaaatacaaaaattagctgggcttggtggcgtgcgcctgtagtcccagctacttcggaggctgaggcaggagaatcacttgaaccagggaggcagaagttgcagtgagccgagatcgcgccactgcactccagccaggcgacagagcaagactccatcaaaagagaaagataagagaggaagaaaggaaggaaggaaggaaggaaggaaggaaggaaggaaggaaggaaggaagaaagaaagaaagaaagaaagaaagaaagaaagaaagaaagaaagaaagagagaaagggagaaagaaagagagagaggaagggagggaaggaggaaggaaggaaggaaggaaggaaggaaggaaggaaggaaggaaggaaggaaggaaggaaggaaaagattgatttataggagcctgctgtgtactgtcactggagagacaaaggtgaatcacacccggtccctggcttgcagagctccaggctatggacggaacccactcaaagtcagaccattactattcagtgagaaacaccgtgacaggcatcagaaaagggttttctgacccatctcaccaatgccctgtgaaaaatctgctgttggttttctgggctcagtttttctcatttcaagttcagaatgaaaaagagaatgtaaatgtccctgatggtcctttgtgcggtcacagctgtacccggcatgtcctcccagttaatccagggtgctcagggctcccacttcactctgagcgtcctctttcctatcggagctcaccacgtctgcacctgcagcagccaggtggctgcacactaatagaaaatccagcaagtcagaaaacttgatttactcctgtaaatttgaggccagtgaccttgtgacattgaactactcctataacttccctgcactttaatttccacgtctgtaaagtggggcaggtggattcggtcaccctaggtgcagctatatagtgagagctcctgagagacagcagcacatctgatcttctcgcatccaccatctagcaaataccaggcacacactagacgctcaaagcctcactgaatgtgtgtgtgaataaatgactatatgagagccatgtggatcatggacaaagtcaataaatatttttgaacatctaccaagtacactgtagaatagggaaataagtaacccaggcagggtggtgttttctcctaacttcccctgaccaccttcctgaaggtgggaaggactctgtacatcagggagactcttgacacaaataatgttcttgagatgcattgcaagaagtcatgttaacaagaggaaagtccatttgtcttgggggtgttttagtcaatggatctgaaggacccgaagccccctctgatgacacacagggtgcaacacccaccctaagttcatggaggggaaaccagatggagtgagttgacagggagcaggacctggaagaacagggggtaaagagactgaggcacccggagggaggtctgaggagttgctcccaacccctgcggtggcctcggtgtggactgatgcagaactcagcagcataagtaagtaaagtggccgcaccaggctctatgcatacatgggaccatttttcagtaagattttctttctgctaatgggcttcacttttgcccactttctaacacatcaggacaagttaataggttacaaaccatcgttccattcagcagtcatttatagaatactcccaaagtgccaggccctgtgtgagttcaggcaatacaaaaatgaacataaaagctcctgtcctctaagatccccatccaatgagctccagggagcacctctcctacaacacgcccctgctctgcacggccctcctctctgccctccaccaacccaaatcctcctccacctccagctcaagttccacccaaccaagtccctctcagtccccctgcactcctgccactttgagagatgactgcactcatatctctaggttttatgaagtggatgtcatctccctggttagacttgagcctcctgaaggcagagaccatttttagaattttccagaaaaaaagccacatcagtaatttgcatcagaacaagcttagactctgctcaagccttcaacttagacagagactccactgcctagcacagtccctggtccctgcagtgctttataaaccctgcagtagcaaagtccacaatcaactcgtgtgtcagtcaacaggctgggataagttgaaaatgcagacagagaagaacagtcaaacaaaaatcaaagggctttgactcatgccttgcctcttcccttttctcagggaaacaaagtcacaccccctgctctcactcctgcctggaggcttccagggagggctcccttgttagccttcccttcagcccccatgaatatcacccagcattcaagcccagcctctcctctccctttgagcacattgcctaaagtctcaaataaatgtcaagtttagtgagtgctgatattctatgcccctaatgtttacttcaagtattattacctttcttcttttgcccggggccatttccaaacaagggctggagccaggcgccccagcagctgggcaaacacacttcagggctccttccctcctgtggctcctgtttctcaaaccctctgggacctgcagctctgggggtctcttcccccaacccagttccctcccctttagaccagaacaactaagccatggccaccttcccgatggacacacaaggaggcctggtgtcacccactgctccaggggcggtgttctcggcaggggagctgcctcttgtcccggatcctgctctgctgccaccttatgtggctgcagaattggagggaattgtgaacagagagaggacagggcaacttcccaggcaacaacactactattgccaatattttgccaaggatgggagcaggagcacagagggaaaacagaccttgtcaacgtctcctccaccaacacataacacccactttcctgccaaatactcagatagagaaggtcactgaaagtacaagaaaattcaaatgagaaaaaagacttgaggaagaaaccatgaggcattggggtgtggggaggtgggaaggagtacaggagagaactggcatggctgccaagttgtcagtcaccttcttatgttcttaagaatgctgcatttcttttgtttgaccagtttcacttcccagattcccgtaaagcacatggtctaatctgttacctaacagcaggaaagcatgatctcacctgttcttgccctcaagtaggaacactgccctgggactatactgcagaccaccaggctgagccatccccagaggtcaggagcttccaaccgggaacctttcatacactcttcaagcaacgtacagctccaccgacagtcacaataaaaattctaatatcttccctcctcctgttgctgatgtccatggtctctagcagcctgaatccaggtaaataagactgtctatgaaggggaaaacggggggaggaaatggagcaaaacaggccacaggtgcatcaaaatgtagccctttcagctacagggattgggagcaagtgagcctttttcagtgccagtttcctcatttactgaaaggagcaaactgtacttacatctagtgttgtgagggttaaatgagatattgtatgtgaaagtgtctgcaactacagctggcagatatatacatatgtacatattggttcaacgaatatttgctcccatgccttcacccccaagccttttccagaagagtaatgcatttccccagggtcaaacttggtggcagtagtgggagggtattgaaggcaaccatatatttataaaagataaggaactctttgcttatattcttttttttttttttttaaagacaggatcttacgctgtcgcccaagcttggagtacaatggtgcaatcatagctcattacagctcaaactcctgggctcaagcagtcttcctgcctcagtcttccaagtaagtagggctaaaagtgtgcaccactctgcctgcctagtttttcctttttttttttttagagtcaaagtatcactatgtttctcagtcagatctcaaactttgcttgtattgtttatattctttagagtgcaccaagcatgacatactttaatgctattcaatggtagctaataaacggaagaaaatcctatcaccaggtagtgtccgtatttgaagctttagccacaccaagccctgctgcaacagtgcaccatttgggtagcagacctttggctaaggctttctaatctgctccagttttcactacaaccaaagtggccaagccctttgcaaagaaatcatgcagaagacagcttagccccatgtatatttccacttgggagcaccatctccccaagggccactttgaggtgaaacagctttgttacatactcagcgtcaacttggtcctaaaatcaggagatgttcagccttctccactccaatttccaatgttccttgctttgtagagagagcgctctggaagctgctgagccccatagccctggggcctaaaccaccattcaggaagggaaggtttttccatcactgtgacagacacccaggccagagtcctcagcctagactaaaaggtctagccccaacctccgtttccagtgcaaccccctccactcactaaaaattactctctctccacccaaactagactgtttgcccttccctgaacagggcttgtgttttcccaccagttcaactttgcagatacactcaactcaaaaaccatcttcccacaggccagacaagtgctcagctcctcccacacccagacaatcactctccatcctgaaagctggcttagccctactggactctctcttcttgcacttatctgctgccttatattgaagaccttcctgtgtctctcctgcctccacccactacccttagaggttgcagcctccttggcagcacagactggtgcactgtttccatatccctcatgctatccagctcagcactcagcaaccattagctaaccgcacgaatgcgtcctcaggtttctaaatcaaaccagggcttcagagcaggtctactgacaactgggctgaccgattccttgtagtgagggctgttctgtgcattgtgagatgttcagcagcatccacatgccctctctccactacatgccaatagcagccttccccctccctcaagcaccctcttccttcatgaaagcaaaaaatatttctagatattgccaaatgtctccttgagggaaaccacccctagtcgacaaccattgctttataccaatagttctccacctggcccacacatttacacttatctaggcatttaccctcagcctggaagtcaggggggcctagatccaaatcctggttctgtcactccctttgcaaccctggacaagtcgcttcattttttttctagcctttttatcgtcttaagatgaataaataccactgttcacacaggcttgttgtgaagattagatgaacctcagtgtaacctggaaagggttcaataaatggactgaatggaatttctaaagtcgctcctaaagcactagggtgaggaactggggaaagctcgctgcgccgccagggggcgccatcacaaaccacctcggtgggtggcgccgggctcgagctttgtttcccagccaagtagtttgtaatgcgggcctgactctgagctacttagtggctggaagaaataatagcccctccattcccaaaataaatctcaaaataaaatctaatcttattttatatccctttttttttttttttgagatggagttttgctctgttgcccaggctagagtgcattggcgcaatctcggctcgctgcaacctctgcctcctggattcaagctactctcctgcctcagcctccctagtagatggaactattggtccctgccaccacacccagctaattttcatgtttttaatagagacgtggttttgccgtgttggccaggctggtctcgaactcccgacctcaagtgatccgtccatctcggcctgccaaagtgccaaagcgtaaaccaccgccccgagtggctggcattgtttattatgtcgctgatattgtcccaaatttggccattgggagttccttctagttggtttctgtgacttttgacacaaccccatcatttttcaagcagttccttacttctggccccacagaatgtttacttctggccccacaaggctcctcttgtgctttcttgcccagccctggatcagctatttctccagggacccctggttcctttcatgggaaaatgatgtttacagaccatgggcacccatatgcccattgctagtaggtgccggtgcttctatgccctctagtggtcggagctgggaaataacacacccacactagtgtactgttacccacatttcacaaattaggtaaatgaggcacagaaaagttagacaacttgaccaacatcacagagaaaataggtagtagaactggaaaacaaaaataatgacagatgcacaagtcctaacaagcaaaagtaacttcttcacacatgcatgttagcagaaagccacaagcccaatattccagcatagacactctctttggaaaataaccagaattccacagcaataaacacaatgataaccatcacgtactcaacacccgcctggacactgggctcccacatattcccaacaactctgcaaggaggattttaccatcctccttttacaaatcagggaatcaaggatcatagaagccaagtgacttgtccaagtcaacatagttaagtgacagaaccattagctgagcccaggtctatatctggatataaattccatgcttatgccactatataagcatttcccaaaactgattttaggtgaaacataaataaacttttaagtttaactgtgtttattttaacgcatgacaggaaaaaaaattaagcacacatcaaatctctgatttcatggacaatattgcataagacaaaaatattttgtcttcagttcctggcctcaagccatcctctcacctcaacctcttgagtagctgagatcacaggtgtgagccaccaagccctgctaagacaaggatgttttgtaaactaaatttaattacaaaaaaagtatgaagtaaataataataaaggtggtaaagctgtagagaaaatcataaagttggtctagaaatgtctggggtctggatgacataatactacagcaccatgcagcttcattctcagttactcccaggaaattagagtcacataacactgcagaaagaacaattcagaatcttagacccgggctttagccctggatgtgtccactcctaggaccccaaacatctctgtgacctccttgctggaggtaaatccaaccttcccagacgtgtgagaacactaggaacatcctgcacacatagaggggtttctctgtcacagagaaaataacaccaggtttgaggaccccagggactctctgtgtggtgctgacagacccaaggcccagacacagcagaggtccgtgctggggagggcgggtcgtcctgttatggaacaggggtccaaacaagcttgcttctcagagcatcttctggggaactgaatataaacagaaagggaagaggaggagggacaaaagagacagaaatgagaggggaggggatagaggattcctgaacagagaccgcacccatgacccacgtgaccctgggaaatgcttctatccctgagaggaggctcagcacagaaggaggaaggacagcagggccaacagtcacagcagccctgaccagagcattcctggagctcaagctcctctacaaagaggtggacagagaagacagcagagaccatgggacccccctcagcccctccctgcagattgcatgtcccctggaaggaggtcctgctcacaggtgaggggaggactccctcggagtggatgggaggagggagcacagagactggctagggtctcctggggaggacaaggctctgagaggagacagagggcttttgttgaagcctgaggaaacagaacaccagagagggacaggggtcacaacaggaaagtcacactaaactgggattgataaaaagggaggaaaatcaattgatcatgttttccaagttaatcatcatttgtcattaccatttgaaaaaaaagaaaaatgatagaaatcagaactgcattaggatgacactccaaataaaaatataacaaggaaactaaatgctgcccttactcaccaatcagaagttgaaaaataaccaccagatacactcattaactcatccacaagcatttgcaatcaattttagtcaatggcatacaacaagcatcagacaagtctcagtcatcacagagcttatgctgtcatgaagaggaaaacacacacacaaagagatatagaatgtgaggtcaggtgttgacaagagccctggaaggaacagagcagggaaaggtcagaaagaaaagacccagggtctgtagagggggtgtcagggaagggatctcccaagaatgccctgatgtgagcaggacctgaggccagtggggagggagccatgcagacccctggggaagagcattccacacagggaaatgccaaggtcaaaggtgctgaaggaatgggggtgtcacactgctgactttgactcagtaggacacacacacacacacacacacacacacacacacacacacgctccaacgtggaggggtgaagagacctgctcaggacccagggccctgtttttccaccctaatgcataggtcccaatattgaccgatgctctctcctctctcctagcctcacttctaaccttctggaacccacccaccactgccaagctcactattgaatccacgccgttcaatgtcgcagaggggaaggaggttcttctactcgcccacaacctgccccagaatcgtattggttacagctggtacaaaggcgaaagagtggatggcaacagtctaattgtaggatatgtaataggaactcaacaagctaccccagggcccgcatacagtggtcgagagacaatataccccaatgcatccctgctgatccagaacgtcacccagaatgacacaggattctataccctacaagtcataaagtcagatcttgtgaatgaagaagcaaccggacagttccatgtataccgtgagtatttccacatgacctctgggtgttgggggtcagttctacttcccacatacgggattgtcaggcctgggttgtgcctgtggccctctctgcattacatcctgtatcagggtttggacatttagtgcaggacacacacgggggagacaaacttccacagatcagaattcctttcctggatccagaccctgcagacactcgctgcagaggaaggacagtctgatggggggactcagcagggcgaggtcagtgtcagacaagcaccccatggtctccccatggacctgaccctgagaaagaccctggagaactggatcagggcctggcctgaggggtccccctagggacccctcagagagaagctcaactcttccctgaactgagcccctgtacaaagccctgtccctggttcctgattccaggtgatcctggggagtctgtgccagggctgtgtggtggcctcttgggcagggctggctgggagcaaggatgtgagctatccaagggccatgactcctggagttggtcaccagccaggtccgagcacccagagcctcatctagctgaggatagggcctcctccttcacttgaggctcagcatggaaaggacagatggaaaaaattactagtgcatgagcccactgccctgggggacacaggttactccctgggaagttcagagtccccaaggggaggaacagagaagagaggatgctcctggcagctccatgtccaccagggatcaggcccagggccctctgtcttggaagcaaataatcatagataactgttcacttgggcagctcctctgtgcagagctgagatcaagtaattgtaaatattttgaggttaactcacaaacaacctcacagccaaatagcacttatcctacttatagaaaggaaattgagggacagggagacagtcactaacaagggtcacacaggccataggtggcagattagagacatatgaggtctgtctgcagccacagccccctcctctcctcaaccgggggtgatggggctgtttgttgttaggcatctgcatctgaggccagtcatgggttcacttccttttgtcttgtgcatccgcagctcagaagtggagattctggtctggaaagtaagaagcaaacagagaattaatcagttttactctagaactaaatcacctgcctcaaataacagagtcagtgctgggattgtccaggcctctcccttcgatccacagtcccctcactgcacctgaaatcctgtttcccgatgtgtgggtgtcactcccatgggaggataaaggagaggactttgctttctctccccactcacaccctgcaccagcacaggcccaaagtgagacacacgctcgctcaggagttctctcttgaaaaagggaagaaaggaagaaggaatgaaaaaaggatccataacctctttagagaccggctcctggatgcagaatcctatgaggttctggccacacctgtttcttgtccctcaggggctgacacccatgttccatccctctgaacccctgtccctaaacctaccccatctcatgtgactctggggttccttggtcattagagggttttcaggtctccctggtcctggtctggggcagccaagaggctcctggtccctggggtctctgaggtcactgtatcccccactgctcactgccatgggtatctctggctctttctgctcctctctgtccctcattttcctcccctttcattctagctgggatgccctgccctgcacagcttcctccacccttaggccttccccagaaaacccctctaacaaggctggctgtcctgttcccttcctgctcacactgtgtcctggcccacatcccaggcaacagagaaggcacagaaatcagccggagcagccgcccctgccgggctccatcacgagccaatgtccccaagtcaacaggagaatgagcttccactgtgtccccatccagggctctttcccccagtgaggccgacatgtggaacaggccacgggacagggacaagcgactcctccatacagtctctactgactcaccaggcagtcagaggcaggatgacaggtctgctttccccaaggcccagaggctaatttcatccattgacttccgtcctcatcttggtgtgaggctcacatcctccagtcattccccaggaccttccccaggtggagccggccaggcaggtgctgtctgatgggtttgctgcccattccacatacactactgtgtcctcatgatgatgccattgtcataaggtggggtcccttggactgagaagtgcaccagccactggagtctcacatagactctgcccagtttagatgaacttaaactctcattgtgttttctcaggttaacaggagaggaagaaagcatttcacatgactgtttggggctccttccctatttgcctaactgcacaggaattaggggcagggagctctttctaaatttactaacataacacacgttgcttctaatttggcatcgttccttcctttatgtaactgacacacacctaagacttcctctcctactggttctatcctcctaagaggactcatatgcctctctctactcaaggagttgctaatttcaaaccaacttcagcatcttcatttgacgacaatatgatcctgctggaattcacagcacacctaaaccttagtatgttatcaagaaaaatactacttccagcccttgatctttgatctttaggacattagtaacgatctccacttatggaaaaaattaaatgtttcccccaaagttcttttattttttactatattcagaacataacatgaggtctaaactcctgacaaacttttcaaagcaaattacaacactacaggtcaagcatcccacatccaataatccaaaatctgaaatgctcccaaatctaacactttttgaccactaaagtgatgctgaaaagaaatgctcactggagcattttagattctgggttttcaaaattagggtgctaaacgggtaagtctactgcaaatattcaaaaatccagaaacagtcagaaatccaaaacacttttggtcctaagccttatgcgtaagtgatactcaatccgtatgaactataggtaccaagctgtacagcaaatctctagaacctcatcctgtgtataactgaaagcgcacacccattgactaactccccattctgcctctcccaatccctggcaaccatgattctactctgattccatgagtgtgactactctagggacctcatataagtggaaccctacagtatctgtcctgtgagtgacttattgcatttagcataatgtccaatgggagaaaatatttgcaaaacttctcctcaaatttctgtctcatatctgtcaaacacacatggtccttgagagtcagatttgcagcatttcatgctccccctttccaccactcagctgtgcatttgcaaacatccacatgtgtttatggagagagccacagggtcctcacctgccctccgcagagggagaagaaacattaaaggccaaagaaaaggaacacggttctgctgggaaattcaggcagctcctgcctgtccccctcactgtcttctagatcattctctgaattctgctctatctgtaggtgtcacaggctcaagtcagtcattattaaacacctgggaaaaactgccccacctgtggttccactgcctgatgaccgaactgacctccaggcttgcccctggtgtcccctgtgttatttctgctgaaaggtccaatcccaggccaggctgcacagtatccttggggtttaaggacaataagaagtcccatcatcacccatctctagaatgtccttagaaaaggaagccacacagaaaatacagctaggggggcaaagtaggactaaagcttgaaaagacccagcacctgaatgtttcaggtgaggactccaagggaagccaggcaggcagctggtcagggagaaaccaggagaagcacaaggggctgtgaccccgggtcctgtgtctgtccatgacccaatgctgctgctcaattcacacttgagaaagactgtgcttctcccacacagagcaggtgatctcacacaatctcagccctcaaatcatcgtgcatctgttgtgtgacacacacacctgccaggggcttttaaggactcaagggggctgagaggtgagagatgccaactctgattgaaagatgcctgtggaggaatcaaaggtgccacacagggcaatcttctctctgttttctgcacagcggagctgcccaagccctccatctccagcaacaactccaaccccgtggaggacaaggatgctgtggccttcacctgtgaacctgaggttcagaacacaacctacctgtggtgggtaaatggtcagagcctcccggtcagtcccaggctgcagctgtccaatggcaacatgaccctcactctactcagcgtcaaaaggaacgatgcaggatcctatgaatgtgaaatacagaacccagcgagtgccaaccgcagtgacccagtcaccctgaatgtcctctgtgagtatcttctgttcctctgtggcccaggctgccagcccaaatccacacagccagagtccaggtctctcagtccctctcaggtctaaggactcagaccctcacccaggctggccatgacttcctgccctgagcaaacctgggcagaccaggccttgaccaagaatgggaggggaggggctgtctcctgtgctacttctgctcaaacacccattcccatcatcactcatctccaggatgtccttaaggctcagggttcacattttctgatgggagaaacaggtgaatgtctcagactttggctcaggggacatagcgggggtttggttgagacttcagggttgtgacatggctcagggggacaccgtggcccttccacagaccaggaacttatgcttccctctgacaacatcacctgtggctttattctgtttcctccagatggcccagatgtccccaccatttccccctcaaaggccaattaccgtccaggggaaaatctgaacctctcctgccacgcagcctctaacccacctgcacagtactcttggtttatcaatgggacgttccagcaatccacacaagagctctttatccccaacatcactgtgaataatagcggatcctatatgtgccaagcccataactcagccactggcctcaataggaccacagtcacgatgatcacagtctctggtaagtggatccatgaagcactagcatcacattttcaggtggagtctggctctcagagaagagccaggaagaaattttctttcccaacctgtgtccaaggggcacacgcaaatcccaaattctcccctgaaccctcccaattcacctctgcagactcttttccccttgtttttttgttttttgttgttttttgttttttgatttctcatgtctgactttgggtccatcctggaatgagaggagggggctccctcagcactgagccctgtgtagtgaaaggggcttcacagagaaaaaaggaggaagggtcctcagggtcaagttcctgctctctgtcaccaacaattccctttctgtcacttctttgtgttcttttacctactccataagctacaagggacaaggaggttttgaaatgagctcacactttttccttaaatgagaagaggaagccccttgggtgatggaggagcagctcagactctgcccccatctctgctcccagcacccccagtgactgactgaccccaccctgaagccacctaaggtggaaccagggcatatggagaaggtgcccaggtgtctgtcctgaatcaggctaaatcaagatgctaatcaacaccaaagcctcccctggatcaggccgcaggaaaatgggaagacatggagcctcatgacagactgctgagctgtgtcctggctctgaagtcactggctgtataagactgtgggcacagcacatgggacacagcacagaggacagcaagtgacgcacacttggagacatagggagattcagccatggggactctgcatggcagggaaggggcagtgacaaaaagtgtgtatttatagagaggataagactaccagccactatgtatctaatataggacttaccttttcaacccttccacgtgtgcaggtccgtagtattaaacacattcccgttgttctgctaccatcaccaccacccacccacagaactctcttcttcctcccaaaatgaaactctgttcccatcaaactcctgggcagagctgcccacctgtgacccacagcctgacccctgaactcacctctagacttgcttctggtctcccgctcaaacccccatccccatcatcacccatctccaggatgtccttaaatagcaaagcctcagaaaaaacacaccttggctgggtggtgtgggactgtgcagctgaaagaaacagcacctgcatgttccaggtgagtaccccaaaagaccaggcagtcagccagtcagggaagaaacaggagaggtgccagaggctgtggctgtcagtcctgtatctgcccaagactcaatgcttctgccctattcacatttgagaaagtctgtacttctcccacacaaagcaggtggcctcgatctccgagccctcagatcgttgtgcatccgtcttctgacacacacacctgccctgggctcttaaggacttgggtggactgaggggtgggagatgccaactctgactgaacgatgcctgcagaggaatcaaaggtgccacacacggcaatcttctctctgttttctgcacagcggagctgcccaagccctcggtcaccagcaacaactccaaccctgtagagttttctacatataagtttaagttatctgtgaacagagataattttacttctttccgatttggatgtctgtttatttgtttgtttgctgcctaatttctccagctaggacttaaaacactatgttgaagagaagtggggcaagcaggcatccttgtcttgctcctggtcttacagggaaagctttcagtctttctccattgagtatccctctattatgttgaggtggtttccttccattcacagagtgtttttatttataaaagaatgttgaattttgtcaaatgcttttattggctaaatcttattactaattataggtctattcagatttttttgtgtgttccaggaatttgtccgtttcatctaggttatccaatttgttggcatacaattatttaccgcactcttttaatctttattatttctgtagaattggtagcaatgtcatcaatttttttgagagtaggtctcactctgtaacccaacccaagctggagtgcagtggcttgatcatagcttacttgcaggctgaaccccctgggctcaagtgatcctcctacctcagcctcctgagtagctgggactacaggcatatgccatcatgcctggctagtttaaaaaaaaaaaaatgtggagactgtgtcgccctatgttgcataggctggtcatgactttctggcctcaagcaaccctcatcctctgacctaccagggtgctggaattaaaggtgtgagccaccatgcccccattttcatttctgattttagtaatctgaatcttctctttttttctcagtcaacctagtaaatgattgtcaattttgttgatctgttttgaagaaccaacttttggtttcattgactccctttattgtttttatagcctccattttatttatttcagttataattcttattgtttccttcattcactatctttgggttgattttgttctttttctatatcctgaatttgtaaagttaggttgttgatttgaggtctctctttaatgtaagtatttaccactatcaatttcttgcacaagattcttaacttctctgagccttcaattcttcaactgaaaattgcaataattctcatcactaagaaatgggtggaaaaaatgaaaattgaaataacaatgcctgtttcatagtatcgttttgaagatttaatgtaacatttgattaagccttcagcaaaatgccacacacaaagaaaagcttcacaaatattagctattattattactactgttaccattaaccttaaagtcaggtagtcctagagtcaaattctaaatccacttgtcactaaccatgtgactttggataagttttctcatcaccctaagcctctgtcttttcatctgtaaaatggaaataatgtctacccaagagagttactgtataaatcaaatgagatacaggtaaagtatttagcacagggcctggtatctaggacatgcccctcaacagtagctaacctagcattaaccatcgcactgagatgactggtgagggctaagcaccaaatggaaactcactaggacatggttactggctaaacatgggagagaggaaaaacagtgcaaagaatcaagcctggtatgttagctttcatccactgagatgcagccaagatgggattagaggtacaagataattcactgggtaaaacagccatgagggaaggtggagcagcagtgacaggagagcctaagagagccctcagaccacgatgcagatctcattcctgagaaggagaaagagaaggagggaagttttacatagcagtgcagttctgagtttccccaagaccgatggggagtccttgaacccctcacccatgagagtgaagcagggtctcacagacctgggcttgctttctttcccctggtgggagcccatgggaagtgagttctctgtgcaaagaacatagtaaattcagaatgcactagcctgggccttctgtccatcaagtccctgccatagagctccaacaggctcttattcatggctgccacaattgagacactgagaaaaagatgcaaacataaaaatatagaaagttctaatgacatgcaaaaatagcaatcagactttctcaaattttcaaagccttcaaaaatgtctgagtgcagaaagaacaggatgaaattgacagaagactgatcaccaacctagaaacgtggtaagagagaaaaaaaattgcaactttcccacaaaactagtgtattccttgaaggaacaagtcaagcctacttcatgttgacagctagttcttggggaccccactgtagaataacatcaccttcattccttctctcttcttcccacaaggaagtgctcctgtcctctcagctgtggccaccgtcggcatcacgattggagtgctggccagggtggctctgatatagcagccctggtgtattttcgatatttcaggaagactggcaggtatgatcgcctttcctcttgccatgtttcctgcagggctgaccaccatgcttgggaaaggaaaaaaacttcttcacctgtatctgggactggatctccttctaccgctaaactcctgcttctcagcactaattcctgcaggtctcttcttccctggtcttcatgctccctgtaccccactgtctcctagatataattatccccagcctctgctcatttgtttcctagagtcaatacattgtcaaagcctcttcgtcctttttcaacatctctcacttttgtcagtctctccattcccatcaacctcaataattgttcaacatcctgcttgaccccttgttgtaaggttggaatccttcttgcatatgactgcctcattaccttcctaaaatctagttcactcacctacttaaggagccaaagggggccaggcacagtggcttatgcctgtaatcccagccccttgggaggccgaggtgggcggatcatgaggtcaggagatacagaccatcctggataacacagtgaaaccccgtctctagtaaaaatacaaaaaattattcaggcatggtggcgagcacctgtagtcccagctactcgggaggctgaggcaggagaatggcgtgaacctgggaggtggagcttgcagtgagccgagatcgtgccactgcactccagcctgggcgacagtgcaagactccgtctcaaaaaaaaaaaaaaaaaaaagaagccaaaggaacctgctctggcctactagttaagttcaaatttcttctctttactaattcttcttactttctttccctctacttcccagtataattcctccatcttaattagaatctgactctctacacatccctgcccctttaccccggatgcacatagaattcttagtttcaatgttacacctaaaaacagggtgatctcccctccactacctgccctgtggacttactcacacccttcatcacaagcaacctcttatttcatggagaacacagactgtgtagtattaatatgtgaactttggacacatcctgcatgtggctgagaaccttttcctgacaatcaattcatgtgttcataacagatacagaaatgaagaaggcaaggtccctacccccagggaacataaagcccaagacaggagataagacctgaaaaataatcatgataccaaagtagaaaggagcgaatgccacaaaaattcagataaatctgatgggaaatatagctacacattggaatcactccgaaacatttttaaaaacggatgctcaagccccaaccataaattctgatctactgatctggagtgggacccaggcattggtaatttttaagcctctccagacgctactaatgtgtagccacgatggaggatccctgttctaataggtaggacttggggctaaacccatggtttttagctaggaggattagaattacctctggagctttttcaacatacatgggcctatactttgttggcctaattcattaatgggctccaccaagaactcagtaatctaactgagaaacagaaactaaaaggaaaagccgccttatttgatatgttacattatatgggaagcactgtcaaatgataagtgatgctaaaccttctctaagttatatttatggttatgttattgatgtgagtgttccaaaaattataagagattcccagaaatctaacagattataagccataatgtcatatgccacagaagtaactaaatgtctatgggagatgcattctttttttatttttatttttatttatttttatttttttttattgatcattcttgggtgtttctcgcagagggggatttggcagggtcataggacaatagtggagggaaggtcagcagataaacaagtgaacaaagaaacaagtgaacaaaggtctctggttttcctaggcagaggaccctgcggccttccgcagtgtttgtgtccctgggtacttgagattagggagtggtgatgactcttaacgagcatgctgccttcaaggatctgtttaacaaagcacatcttgtaccgcccttaatccatttaaccctgagtggacacagcacatgtttcagagagcacaagtttgggggtaaggtcacagttcaacaggatcccaaggcagaagaatttttcttagtacagaacaaaatgaaaagtctcccatgtctacttctttctacacagacacggcaaccatccgatttctcaatcttttccccacctttcccccttttctattccacaaaactgccattgtcatcatggcccgttctcaatgagctgttgggtacacctcccagacggggtggtggccaggcagaggggctcctcacttcccagtaggggcggccgggcagaggcgcccctcacctcccagacggggcggctggccgggcggggggctgacccccccacctccctcccggacggggcggctggccgggcagaggggctcctcacttcccagtaggggcggccgggcagaggcgcccctcacctgggagatgcattcttatcataatgaactctcatcagatgtttaaccatactcattttcaatctttgtcattcactgacaattgttttttgttttgttttgtttggtgggggggttgttttttgtttttgtttttgttttgagatggagtttcactagttgcccaggctgaagtgcaatggcgtgatttcggctcaccgcaacctctgcctcctgggttcaagcgattctcctgcctcagccccctgcacagctgggattacaggcatgcgtcaccatgcccggctaattttgtatttttagtagagacggggtttctccatggtgataaggctggtctcgaactcctgacttcaggtgatccacccgcctcagcctcccaaagtgctcggattacaggcatgaaccaccgcgcccagccccgacaattattttgattcttccttccttaaagcatttgcaatcagctaccatccaaaattgcttcttcattgaggatatttacagaaaatactccgacatgtactcttgaatacaagtttctgataacattaaaatcataccattagactatttaagaatttccaaaattttaacaaactgatagcttcatgaaactgccaaccaagagcaagcagagaattcatttcatgagactaaaagataataatgaaaataatatttttatgattttttatttgaaattttgtggattctttgttttgtttcccagatttcaggaaacattttttcttttaagctatctagagcttcaacaattttgcgaacaaaaattgaaacatctatattttctccctacctgactgctccagaattcggaaattattcatgaatatttatatgtttataataatatcgttatttgcacaaaaaatatagttattaatattaattgttataaaataattattattgataaacaattatttgatgatcattatttaataatttattaatatttattaataaattaataattattatttaacgactaattgtaattgttaattaatattaatattatataataaatataatagtatagttatttgctcaataaaaatctgctccctttataacaggatacatttgaaaacactggttatattacccaggctttgattgggatgttatatttgggaatatacatagatgaacccataggcactgctggcaaagtctgaagtcggccttggtttggcttcctcatgtcaagaggtttctaaaagtttaatctgagattccttataaaaacttcctgtaaaacaaacttgaaaagaccccaggctgggcacagtagctcacgtcgataatcccagcactttgggaggccgaggtgggtgaatcatgagatcaggagttcaagaccagcctggccaacatggcaaaacctcgtctctgctaaaaatacaaaaaaaaaaaaaaaaaaaaagctaggtgtggtggcgggctcctgtaatcccagttactcgggaggctgaggcaggagaatcacttaaacctgggaggtagaggctgcagtgagctgcgctccagcctgggagtgcatacataggcctatactattcatgtgcgtacatgggcctatactattcatgtgcatacatagggctatacataggcctatactcctattcaaggagaatcgcttgaacttgggaggtggaggttgcagtgagctgcactccaacctgggcaacagggcaagactctgtctcaaaaggaaaaaaaaaagactatgtggtcacctgctactcttgttgcacttatataaagaatgaggccaagttcgatgagactaaacttatttggaaaacaaatatgtcttactgggattatctttggtagaaataaagatgcctatgaagagaaaaattatgttgaaaaaaactatagtacacctgttatgacatcacagctctgcttattgttttttattttcattatccacctatagattggaccagaccctgaattcttctagctcctccaatcccattttatcccatggaaccactaaaaacaaggtctgctctgctcctgaagccctatatgctggagatggacaactcaatgaaaatttaaagggaaaaccctcaggcctgaggtgtgtgccactcagagacttcacctaactagagacagtcaaactgcaaaccatggtgagaaattgacgacttcacactatggacagcttttcccaagatgtcaaaacaagactcctcatcatgataaggctcttacccccttttaatttgtccttgcttatgcctgcctctttcgcttggcaggatgatgctgtcattagtatttcacaagaagtagcttcagagggtaacttaacagagtgtcagatctatcttgtcaatcccaacgttttacataaaataagagatcctttagtgcacccagtgactgacattagcagcatctttaacacagccgtgtgttcaaatgtacagtggtccttttcagagttggacttctagactcacctgttctcactccctgttttaattcaacccagccatgcaatgccaaataatagaattgctccctaccagctgaacagggaggagtctgtgcagtttctgacacttgttgttgaacatggctaaatacaatgggtatcgctgagactaagttgtagaaattaacaaatgtgctgcttggttaaaatggctacactcatctgactcattctttattctattttagttggtttgtatcttgcctaaggtgcgtagtccaactcttggtattaccctcctaatagtcatactagtagtcatactccctggtgtagtgtattctctaaaagctttaaatgtctgcatgcagccagccatcaaatagtgaatggtctctctttggctggaattacaaaactcagagaaatgtgtcatcaggagaacatcataacccatgaaggataaaagccccaaatggtggtaactgataatagcactaatgctttaagatttggtcacactctcacctaggtgagcgcattgagccagtggtgctaaatgctacatactccaactgaaatgttaaggaagaagatagatccaattaaaaaaaattaaaaccaatttaaaaaaaaaaagaacacaggagattccagtctacttgagttagcataatacagaagtcccctctactttaacttttacaaaaaagtaacctgaactaatctgatgttaaccaatgtatttatttctgtggttctgtttccttgttccaatttgacaaaacccactgttcttgtattgtattgcccagggggagctatcactgtacttgtagagtggtgctgctttaattcataaatcacaaataaaagccaattagctctataactaaatttgttgtaattctgtctcttgatgtgggttcacagccagccacggccagtggagtctctcaggcggcgtcattctcactccgaccctcctgccttcctctttcacttacaagggcccttctgaatacactgagctcgcccagattatccagaataacctcccatctcaagatccttaactttacttatttgcaaagtatttttgccaaataatgtaacatgcacatgttccagggattaggatgtggacatttttaggaggtcattattctgcctaacacaagtaactttcataaacatcacccacaacaaaaatttgctttgccttccttctgtgtctcacctttctgcctgaatcacaggccagagcacaaacttcaaggtgaaacacaccagctctgctgtgaactgcctggatgatcctggaccactcacttcacctcccacagtctcttctcatttgcagcacaaggatgacacttactgcatcagaaaatgacagtgcaagagtaaattaagatactaaacacagagcgtggtacctgatgagccctcggtaaacattcctttcagtctcttcctttcaacatcctgtttctttcaccctcacccatctgccctttcatcttctttctcttcagcaacttacacagtctaccctaccagttagcaaagaagccagctacccattctctcttgattctgctggaatgttcttgtgatagagcctgctatctactcaagaaagcccacattatttatatggagaggtctgtttagaacaagaggtcctttttatgttcgcataaaatgtgtacatatggccgggtgcaatggctcacgcctgtaatcccagcactctgagaggccgaggcgggcagatcacctgaggtcaggaggtcgagaacagcctggtcaacatagtaaaaccccgtctccactaaaaatacaaaaattagctgggcgtagtggtgggtgcctgtaatcccagctactcgggaggctgagacaggagaattgcttgagcccaggaggcagaggttgcagtgagccaagatcacgccactgcactcaagcctgggcaacaaagagtgaaattctgtctcaaaaaaaaaaaaaaatttatacctatgtccccttaacttacacatacccatcccaattctgccctgttaatttatatgtgcacttccttattcattcttctttagtctttctctttataccttataatctaggatagcacagagacaaaactaatgacccaggccacaagaggggattttttttttagcaagacgaatgctttccattaaaaaaaatcaatgctttttttttggcaaaaggaatgctaatttgcaaggcacccctgaagcctgtttttaggcttggcttttggaaaaaccatttgagcctacaacacactcttagacgctccccaaacaggagacgataattaccacagaagccacattcactccacgtattcctgctgttggataaatgtattttcacagaatgttgagcatgagttactcctccccagtccttccactcctggaagttaaacttccttcttaaccatcttcatctccaggtggactgccaggactctggctggaaaataccgcccacgctggatggccagggtggcacctttgcctattcccataattataatagctcacactaatgcagcactcactatgcaccaggcactatcctaagagctttccagctagctacagtcctcacaaaacatcctgagtgccaccatccccatttttacagatttttaaaactgaggcagagaagtgaagtagtgtaaccattgtcacccaacccataatttaacctcattcccctccccctctgggcagaggacaccctaagatttccaaggtctcttgaatgacatccaccttccagaatgatttttgccccctctactctcaggatttgacaaacagccagcattttgttttctgtctcactcttcacttatgcacctgttccctaacaccacactcacaactgcacagcctggaataaaagctggcttttatggacctcaatctctttggaaaaaaaacagggccaggttcccagtcatatacaaagtcatttttactcaattgtcaactacttgcacagccattccctggccacaattgaggtatgctagggacagaaagtgtaatgagaaggaagtaggaggagggtgacttcctggaatggtcccaaagaggagaagatttcaaatccagaagcagtcataaaacacacccagagtatggcctttgaataatgacagccccacctgtctctttccatgcctcgtggcctctatcttccttctcagcctgcccttcctgcccttgctttcttagatcaatactaaccacctgggagctggggccagaccagagcacatagcactgagtcgtcagggtggaggagctgaaaagagagaagagtgtttaacttatgggcgtctgactcacctaggtacacatcacctgggcagaaagtggattcatgatgacctgtgcgagacttatggtaattcatcaaaatgagtgactgaggcaagtgtctgaatcaatcgagatttattaagccagagcttgagggcacgccctgggaaaacatgaggcctagaaaacctctgtggcttgcattctctctgaagtggttttcaagagaccaggttttctgtctttttttttttttttttttgagatggagtctcactctgtctcttaggctggagtgcagtggcatgatctcggctcactgcaagctccaactcccaggttcaagcaattctcctgcctcagcctcccaactagctgggattaaaggcatgtgccacaacacctggctaatttttgtatttttagtagagacagggtttcaccatgttgctcaggctggtctcgaactcctcatctcaagtgatccatccaccttggcctcccaaagtgctgggattacaagcatgagccactgcacccagccgaggccaagtgtttatacgtttccttaaagcggggaaggcagataggaagaggtggggtaggcagaagaatgattaatcttgcctttgttctgtacctggaaagataagcattatcagtctgaaatataacaggctttattcttaagaactagatttagattgcagacctaaagttacaatcgacatgttcttgttttatgggagaatatacatcttaaaaggtgtataaaaaataaaaagggtttgagagcagcaaagaacaatttgtgagggcagttatccagagatgcctgaggccttttcaccttcccatggaggtctgactaatgtacaatgccttgacacaaggtcgtgtagtaatagctattcattttaggaaatgattatggtgttacatgactcagtctccaggttgaacttccctttggcataaagagtttgggagttctgagatttttttttccctttacatttaccccctttttttttttttttttttttttttgagacagtcttgctctgtcacccaggcagctgagctggagtgcagtggcacaatctcagctcactgcaaactccacttccaaggctcaagcaatcctcccacctcagcctcccaagtagctgggactacaggcacatgccaacacacctggctacattttttttttttgtattttttctggagacaaggcttcaccctgttgcccaagctggtcttgaactcctgagctcaagtagtcaacccgccttggcatcccaaagttcgaggattacaggcatgagccactgcacctgaccagcacctattcttcaaaatctttcacagaaagcgttgtagaaaacatgagtttttggctgtatgtttcgtctgatcctacatcactaggaaggttcattcttaggacattgtgttccatggagaagggcatgaagttcattagaaaaagaccaaagtcaagttacgggaacaaagggaaagtaatcctggaaccctattcaagctacacagctgcctcttcaactaaagcaattctttaggcaatcatcactctaaccctttcagttatatgttggctcacttgtaatatgtggtaatatgtggagcagactataggctagtttttgtgttttttttgttttgtttttttttttagagtctctgaagcatcttcaaattccagtggcaggttcctctggattgtagtctgaatcaggtgtacaactgagccttttcagtagtccatacatcagcaggcatgaaggctgttgatctataatgctgtgtttttctcctgaagtttacttaaattgtctagcttcaggttgcagggctttaggaaaaagcactgttttaatttctaatgattccaagtcagaaaaacggaagaaaaatttgaaaatgttagctttgatatacaaaaatgtaccaaaaagtacagcagagtcactacatcaagactagtcctacacaaatcttctgtcattaaccaaaattttccagaggaaatggtgatttttattgtctgcttgaccagattgcacagagaaagagaagccaggagcctcactggaaataaattcttacccttttgctagctgatcatcttcctggattccgtcatggccaaaaacaggttatggttgtacatcaggttttagtagcaagacaggttatgggagggagaaaggaggaggctcggctaacaaagatggtcttgttatgtagatgaaacttcacaggtagcagctcccagagagagtagatggtaaatatttatttcagatctttaaggtatcaagctcagttcatttttcctggatccagacaagagaaagtctgcctgtattaatagggattctctacagatgccaattttctcatgaaagacagctttgcagggccacttctgcttgctggccctccaacagacatctcaaaataggtcagaaaatacattttgggttaaacatcttatttccttcaactgacacatgtttctagaggtttaacttggtgtcctgcagttgcgggtgttttcgccaattttgaggacggttcaccataatgtagagctcctgctggatttgaccaagttggaaggtgttttggacactacgcggggtcaagagttggtcaaatccaaaggaagaatgacaaaaatcaaaaacacaacaagtgattgcacaaattacgtactgttgaacactctaagcataaagagaggttagagccggccgggcgcagtggctcacacctgtaatcccagcactttgggaggccgaggctggcggatcacgaggtcaggagatcgagaccattctggctaacacggtgaaactccgcctctactaaaaacacaaaaaattagccaggcgtggtggtgggagcctgtagtcccagctacccgggaggctgaggcaggagaatggcgtgagcccgggaggcagaggttgcagtgagccgagatcgcgccactgcactccaacctgggccacagagtgagactccatctcaaaaaaaaaaaaaaaaaatagagaggttagagccaactagcaataaaccttaatctgcagctatcaaattctaaaacaaaatcccaacccagctccttacctgggaggggaccaagctgaaggctgctctccattggcacaggagaagaaaactcaccttccttataggaagtgagcaaaactccaagagtaaaggaattttatggcaaaacaaaactcagatctcaaacaatcaactggggagagcagtgacctcaagaaggaatagcatctgatcctcagaaagtcacaaaatcagtcaaagctaaagcttgatagttggtaccaagcgtaaacaggagaatcgctgcaggcctaaagagctaagctccactcagagggttccttcatggtcaccaaaatgttaaccaaaatgagtgactggggcaagtgactgagtccattgaggtttattaaaccaaagcttgagggcacgccctggaaaaacataagtcatagaaatgctccatagcgtttctcatctttgaagaggttttcaggaggcctgatacttatacatctgcttaaagtggagaagggagataggaagagacaagtagagggaagaataattggtctcatctagtctttcttctgtacttggaaatacaagcattatcattgtgacatctaacaggctttagttttagaagctagatttagcttatacacctattgttacaattgctttgtccttgtttttttttgagacagagtctcgctcagtcgcccaggctggagtgcagtggcacgatctcggctcactgcaagctccgtctcccaggttcacgccattctcctgcctcagcctcccaagtagctgggactacagacgcccgcgactacacccggctaatttttttagtagagacggggtttcaccatgttagccaggatggtctcgatcttctgacctcgtgatccgcccgtctcggcctcccaaagtgctaggattacaggtgtgagccaccacgcccggccgctttgtccttgttttatgggaggatatacatcttgaaaagttccaaggccagtaaagaataatttgtgaggacagtcacccagagatgtccgaggtctttttgccttcctgtgggggtctggctaatgtacaatgctttgacacaggttgtataataacagttgttcatctggggaaaagatggtggagtcacatgactcagcctccagactgaactatcactttggtgtaatgagtttgacagtcctgagatttttactttcctttacataattttaagagtcaaggggctgggtgcggtggctcatgcctgtaatccaggcactttgagaggccaaggcgggtggatcacgaggtcaggagatcgagaccatcctggctaacacgaagaaaccccgtctctactaaaaatacgaaaaattagccaggcgtggtggcgggcacctgtagtcccagatactcgacaggctgaggcaggagaatggcgtgaaccccggaggcggagctagcatgagccgagatcacgccactgcactccagtctgggcgacaaagcaagactccatctcaaaaaaaaaaaaaaaaaaaaaaaaaagagccatacttcctcgatgctgttccactgaggtcaaagggatgggtgtggaaggcatcacagctttttcctatttagaaacccattgacccttccttctccccctattgggttacattcctctgtccatagatcacatatttactgagttgttttccaggggaaaaaaaaatctcagttgaactccttaaagccccaagcattcaattcagttcaagagtgtctctcattttaatgatgaccaggcataaatattttttaaaggctctccagaaaattttgataagagcctctgcacaacccacagtagctttggggagcactgagctacaaaagtgatggggaaggaacctgctatgtgctggggacctttatatgtccaccttatctaatgccccaaatgacgctttaagtaggcactattatccccctatcccaagacatcaattaacttgtcctttatctcagaattggtcaaaggtggaaccaggattccgactcacatatttctgaatctaaaggtcatgtttcactgcagagcgattgagcctacacgaactcaaagaaagacaggatgactgcttctaacagaaataaccatacagtcttcaatgaagagtcagggtctgaaatgagccttaggacaaagaacagctcaggaggctgagaagacagtcaaaggtattgtggaaaggagtgaaagaattagaataagttcagacatgaaaacataaaatggggatcaagtctttctacacaaaccaagggagtagactggggctgtgttatggggcctttgaatggcagcctaaggaattgaaacttcattctatggatgataggagtcactggaaagctttgagaagctcagtaacatgacaaacagcatttccaggaagattactctgacagtgtaaccaaaaaccagtgtaacgaaaaccaggttagtcgcatgctgcatgtagagtcccatcaacatgagtgaggtccgatacaaaaaaaaaagtgaatttattctaaagctagcttggaggaaggggcacaaagcattctgcctttaaatgtgctgctccacctttggagcagaaagcaggcatttttttagaaggtaaaagagaaaatgagcaagaacaagcgtccccctgctactgggcaattatctaccgggcagttgagatggtgccttcctggacagaagtaagttgtaaaaatggccacgtgggcatgcttctgacatgttcccctagtgggtgtaagttctgaggtgacccaggatggaagctctgaggcaaccctctggaggtgaaagttccatggcaggtattctttggtccgctaatgaactgtcaactcttgagagattcatcacggagcacacagctagaggaacttgccctgtagggaatgtctggtgatgggggaggtggaaggttatatatgcatttctgaagggctaagggtaggaaacgggtagccagggaaatgagacaggagacagagggaggaaaaaataattaaaccacctctagaaaaatgggggtactcagttaccattttccactgccaagctttatttttatctttatgggatctgggtgccatatttgttctgagtactttttgctgaaagggcgcatagtcagtgagcattagaatgaaactgatctacctggagttggaaatatttatgagtacccggacttatagattatattggttggagcattgtggtctgaggtctagaaggtctctgggaaagcgtgccttgtatttttataaacaggttgtaatatcaggaagctccacaccagagggatatgcctatccctgcaagcagggccaatgttataagcagcttttgctcctacgatggttctgacccaaatcaggatgctaaccattggtcagcaacaatgtggggttaggagaaatgaaataattatttctgttaaaacaattaaaaaaattaagctacctctagaaaaataggggtacttggttacaatagtgttaggcaagataacttagagatgtggttctgaactctgacaacttaatagaattacctagaagcttttctctttttctaaacttttcattttgaaacaatttcacactttcaaaaatgttccaaaaatagagtccccatatacttttcactcaattttcccaaatattgttttagataaccacagtgcaatcattaaaatcaatacataggccgggcgcagtggctcacgtctgtaatcccggcattttgggaggccgaagtgggaagatcacctgaggtcgcgagttcgagaccagcctgaccaacatggagaaaccacgtttactaaaaatacaaaattagccgggtgtggcggtgcatgcctgtaatcccagctacttgggaggttgaggcagaagaatcacttgaacccagagggcagaggttgcaatgagccgagatcatgccattacactccagcctgggcaacaagagcaaaactcttgtctcaaaaaataaatttaatttaatttaaatttaaaaaataaaataaatacattaatcactgacattgtacaatgaatgaatctgcagaccttattgaaatctcctctatctccccactaatgtcctctttctagaccaggatccaatccaagatcacacactgcatctcattttttgtcctctcagtctcctttaaactggtacagttcctcagaatttcttttgccttcatgaccttaacatttttgaagagtattggagttattttgtagaatgaccctcagtttgggcttctattttttactcatgattaaacttaggttgtacacgttagacaagaacaccacagaggtgatgctgcaccttctccatccatcatattaggatgtcctaagatgtcgatatctctgatcactggagacgttaactttgagcactgggctaaaagttcctccactgtaaaatggctattttctttggaagcatttgtaagtgaccaatacttgggccacatgatgaaccaatcatctcagactctcttaggggaagacacaggccctggtaagttttaaatgccatataggtgactctaaccagcatctacagcttacaccatgaagattagaatcctggaaatcagctaggaggccattccttggacctaacatccagttccagacacaatatttggcatggacccatgatagggaaatgggaaggcaaaaaaatctcctaactgagaaatgatgggtgagtagaatgctacccaataaaaagagaaggcaggaccaggtgcggtggctcatgcctgtaatcccagcactttgggaggtcaaggcaggcaaataacttgagctcagacgttcaagaccagcctgggcaacatggtgaaaccccatctttacccaaaaaaaaaaaaaaattggccaagcatggtagtacatggctgtagtcccagttacttacttgggaggttggggtgggaggatcactcaaacccaggaggttgaggctgcagtgagccaagactgcaccactgtgctccagcctgggtgacagagaaagaccctgtctcaaaaaaaaaaaaaagaaaaaagagagagagacgcaggacaccaagtaaagtgtccagcccttctggactattttctctccagatctcagagaaacctgtattgtagtgaaagcacacaccatataatttttttttttttttaagacggagtctcgccgtgtcgcccaggctggagtgcagtggtgcgatcttggctcactgcaagctctgcctaccgggttcacaccattctcctgcctcagcctcctgagtagctgggactacaggctcccaccaccacgcctggccaattttttgtatttttagtagagacggggtttcaccgtgttagccagggtggtctcgatctcccgacctcgtgatccgcgtgcctcggcctccctaagtgctgggattacaggcgtgagccatggcgcctggcccacaccatataattttactatcacaagcctgacgtgagctcctgattgccactgacgggaagggaattatgaattatgtcatggaaatatatgaccacatatgccaagatgcacacttccgggtataactgaatgaaaaattcacaaaatccacatcagagatacatgacctcccctaaacaaccctgttctccccacttggtcttttgtccttaatttcttttgaagtaagagaataaagactgttataaatttcacaaaataggaaagtgtacacatctcctgtcacccggctgtttaagcaagaggacactgtgctcaacttcgttagagttattatcttgaggtttttataaagagatatcatcagtcccctccttagaggggccatctgataacatgcaaaaaaatgccactgtaaccaaaacccagaggcaggaaggaccctgagaagagcaatccctaaggtattcacatgcctgccatggtctggtgctgctggtacaggaggaactgctgctggcaatagctcgaaaaaaagagaaggcagggtcaagtgcagtggctcacgcctataatcccagcactttgggaggctgaggccggcagaacatctgaggtcaggagttcaagaccagcctggtcaacatggtgaaaccccatctctactaaaaatacaaaaattagccaggcgtgttggcaggtgcctgtaatcccagctacttgggaggctgaggcaggagaatcacttgaacctgggaggcggagtttgcagtgagccaagatcatgccactgcattccagcctgggcaatagagtgagatcctgtctcaaaaaaaaaaaaaaaaaaaagatagaaggcagctccaacactcagggagtagtaagaaaagaactcactcaaccttcaattctcaattctcacacagccaacacccttccagcctctctatgggggtctcactgggagggctggcacataattaaatgccaatacatggatgaaataagttacagaagggtggcatcaactgggtcaaaaacggttgaacatttcacaaaacaggaaggatttgggttagaccctgaaagactcaggcttaggaaagcagacacaaagagaaacagaagccaagggaacctaagtaaagcatccagccctcctggccaatttcctcctcagacctcagagggacctttattgtagtgaaaacacatgccatataattttactatcctaagcctgagatgagctcctaattgccactgatgggaaggaaattatgaatcatgtgatagaaatacacaacgcacgcaaagatgcacactttgcaccactctggatgcacaaagacacacacaggccccaccggagatgctagttttgaagaaggtcccaggagtaagagtgggtttgcagatgttattttatttactcttctcacacacgatatggggatatttcacaaggaggatactgatcctcagaaaggggaagtaacttgccaaggttgttggtggatgtgggattagaacctcagtgagtctaacaccggaacccatgccaccaccactaccaccgagagacctgaacagggtatgtgtagggaacaggaaggagcagggagagctgaagcagaaagaaaccattttaaaacagggaagttaggtaagcttgctaaacagggataatatgttgcagggaaatgaacactagacagacgttcaaatttgatctgattacagaaaagccactgaaggttttgagagggcagaaccagccaaagtgaaaccttgagccaagaccaaagaaggtggtgaaaaggggagtctggattcctaagctagagagaagccgccaacaacagtgacaggactacgtgatgcatggagcaagaactagtcggagaggctaaagctgtgggtttaaatacaaaaagtcatgcagtaagggcatggcagggtgaagcaagttatattctttctctgcagttcagtctctcttcatctataatcaggtgcaatgagaattaatgtctaaatgaccctcaacccttgctactcaaagtgtggcccaccaaccaaaagcaacgacatgtccaaaagctccttagaaatgcagaatctcagaccccatcagaaggatcagaatctgtatttaaacaagatctttgggggatctgtgagcacattaaagattgtgaagcagttttctgaagtgtcttccagttctaaaatgcaatgatttcacagtcatctgaactccgtcaccttacaggagaaagaaggaaaataacatttaccttcgtctcatttgtgaccttttcttaaaacagcgtcttagactcgcccacatccaggtagaggatttagaaaacacccgaaaggcagtgctgccaccttgtgaccatcatcagtaaatgcacttaactcttagcggtctcgccagtcgtggaggggatggggctggagcgggcagggtgtaggaagtgaagtccaagtcacagatgaggtaagagaaccataaccgcccacaaagactggaagtaactgtcagagagagctcagcctgcatcacagagcaacgacccattgcaaaaaacagtttttataacaatatgtgatcagtgagaaacagttccaagccaagttctgcccttgtaaccttaaaaatcattgtaatgggtatttcctttcttttcttttcttttttttttttttttctggagacggagtctcgttctgtcgcccaggctggagtgcggtggcgcgatcttggcgcgatctccactcactgcaacttccgcctcctgggtttaagcgattctcctgcctcagccacccaagtagcttggattacaggcgcattccaccatgcacggctaatttttgtaattttagtagagacagggtttcaccatgttggccaggctggtcttgaactcctgacctcaagtgatccgccggcctcagccttccaaaatgctgggattacaggcgtgagccaccgcgccaggccactgtaatgggtattttcaacatcagcctcagcctgaattccgccagtaaactggtaattccccaaggaaacttactttactgtgacagttctttcacatcctgagccaaaatgtgtgtgattcgcactcaccaatccttgtcctgtgtcctccataggctgaaataagtctaatacttctttgtacaacccaccttcaaatattgggtaaaataaaaaaaaaaacatgtgccacccatcccaaattcccttggtggtttcccacgttgggtcacgtgaagtcccacaccttccggtccctttcccacggacgagtgaagtgcagcaaccatagcagatgctccaaatcctaggggtgttccccagagcagcagagccacaggacccccgtcaccgtcctggcacctcacccctatgtagaagctgaaccccgtatcagctgatctggggacgctgacttttcctgcttctgctgctgctcagtcatcctacacctgtgcaggtgtctactttttattcagttttattttgtaagaaatatttgtcggagcctgctgtgtactgtcactggagagacaaaggtgaatcacacccggtccctgcctcacagagctccaggttatggaaggaacccactcaaagccagaccattaccattcagtgagaaacaccgtgacagacatcagcacaggtttctttgacccatctcaccaatgccttgtgaaaaatctcccactcttggttttctcaccaggttccacgcatacatgggatcatttctgagctgagatttcgtcatttcaagctcaaagtgaaaaagagaatgcaaatgtccccgatggtcctttgtgtggtcacagctgaacccgacatgtcctcctggctaatccagggtgctcagggctcccatttcactctgagcgtcctctctcctatcggagctcacatgtctgcacctgcagcagccaggtggctgcacactaacagaaaatccacaaagtcaggaaacttgatttattcccgtaactttgaggctagtgactttgtgacattgaactaatcttataacttccctgcactttaatttccatgtctgtaaagtggggcaggtggattcggtcaccctaggtgccactgtatagtgagaacttctcagagacagcagcacacctgatctcagcatccaccatctagcgaataccaggcacacactaggggctcaaagtctcactgaatgtatgtgtgaataaatgactatatgagagccatgtggatcatggacaaagtcaacaaatatttttgaacgtctaccaaatacactgtagaatagggaaataagtaacccaggcagggtggtgttttctcctaacttcccctgacctccttcctgggggagggagggcctctgtgcatcagacagactcttgacacagataatgttctcgagatgcattgtaagaagttatcatgttaacaagaggaaagtccatttgtcttgggggtgttttaatcaatggacctgagggacctgaagaccccccgatgagacacaggatgcgacacccaccccaagtgcatggaggggaaaccagatggagtgaactgacaggtagcgggacctgggagaacagagggataaagagactgaggcacctggaggaaggtctgaggaggagctcccggcccctgcggtggcctcggtgtggactgatgcagaactcagcagcataagtaagtaaagtggccgcaccaggctctatgcatacatgggaccatttttcagtaagattttctttctgctaatgggcttcacttttgcccactttctaacacatcaggacaagttaataggttacaaaccatcattccattcagcagtcatttatagaatactcccaaagtgccaggccctgtgtgagttcaggcaatacaaaaatgaacataaaagctcctgtcctctaagatccccatccaatgagctccagggagcacctctcctacaacacgcccctgctctgcacggccctcctctctgccctccaccaacccaaatcctcctccacctccagctcaagttccacccaaccaagtccctctcagtccccctccactcctgccactttgagagatgactgcactcatatctctaggttttatgaagtggatgtcatctccctggttagacttgagcttcctgaaggcagagaccatttttagaattttccagaaaaaaagccacatcagtaatttgcatcagaacaagcttagactctgctcaagccttcaacttagacagagactccactgcctagcacagtccctggtccctgcagtgctttataaaccctgcagtagcaaagtccacaatcaactcgtgtgtcagtcaacaggctgggataagttgaaaatgcagacagagaagaacagtcaaacaaaaatcaaagggctttgactcatgccttgcctcttcccttttctcagggaaacaaagtcacaccccctgctctcactcctgcctggaggcttccagggagggctcccttgttggccttcccttcagcccccatgaatatcacccagcattcaagcccagcctctcctctccctttgagcacattgcctaaagtctcaaataaatgtcaagtttagtgagtgctgatattctatgcccctaatgtttacttcaagtattattacctttcttcttttgcccggggccatttccaaacaagggctggagccaggcgccccagcagctgggcaaacacacttcagggctccttccctcctgtggctcctgtttctcaaaccctctgggacctgcagctctggggggtctcttcccccaacccagttccctcccctttagaccagaacaactaagccagacaatggaaaggaattgcgaacagagccggaacaaggcaactttccaggcaacaacgctactattgccaatattttgccaaggatgggagcaggagcacagaggggaagcagaccttttcaacatctcttctaccaatacatagcatccactttcctgccaaatactcagctagaaagggtcattgaaaggtataaggtgggactgggcgcagtggctcatgcctgtacccagcactttgggaggccgaggtgggcggatcacgaggtcaggagttcaagagcagcctggccaatgtggtgaaactccgtgtctactaaaaatacaaaaattagccaggtgtgggggcgtgtgcctgtaatctcagctactcgggaggctgaggcaggagaattgcttgaacccaggaggcggaggttgcagtgagctgagatggcaccatggcactccagcttaggcaacagagcaagactctgtcttgaaaaaaaaaagagaaagaaagaaagagagagagagaaagaaagaaggaaggaaggaagaaaggaaggaaggaaggaaggaaggaaggaaaagaaaaagaaagaaagaagaaagaaagaaagaaagaaagaaagaaagaaaagaaagaaagaaagaaagaaagaaagaaagaaagaaagaaagaaagaaagaaagaaaggtataagtctaatccgttacctaacagcaagacagcatcagttcactgcttttgccctcacatgaaaacagtgttgtgggactaaagcacagactggcaggtcatgtacactggcctcagccatccccagagatcaggagcctccgactgggaaccttccatacaatctccaagcgacgtacagctgcaccaacagtcacaattaaagttctaatctcagccaggtgtggtggttcacgcctgtaatcccagcactttgggaggctgaggtgggcagattatgaggtcaggagttcgacaccagcctgaccaaagtggtgaaatcccatctctactaaaaatacaaacattagccgggcgtggtggcgtgcacctgtaatcccagctactcaggaggctgaggcaggagaatcacttgaacccaggaggcggaggttgcagtgagccgagatcacgccactgcgctccagcctgggtgacagagtgagtctccatctcaaaaaaataaaataaaataaaaatagataaataaattctaatctcttccctccttctgttgctgccactaacgctgatgtccatggtctctagcagcctgaatccaggtaaataagactgtctgtgaagggaaaactggggggagaaaatgtggcaaaacaggccacacgtgcatcaaaatgtagccctttcagccacagaaattgggagcaagtgagcctttctcagtgccagtttcctcatttactaaaagaagcaaactgtacttacttccatggtcgcgagggttaaatgagatattgtatgtgacagtgtctgcaactacagccggcaaatatatatatatatacacactggttcaagaaagatttgcttccttgccttctcccccaagattttcccagaaaagtaatgcacttccccagggccaaacttggtggcagttgtgggaggatgttaaaggcaactgcacgttcattaaagttaaggaaatttttgctttcattccctttttgtaaagacaggatctcagtctatcacccacgcaggggtacagtggtgccatcatagctcactgcagcctcaaactcctgagctcaagcagtcttcctgccttggtctcgcaaatatatataaatagaagtgtaccccacatgcctggctaattttttttttctgtagagacggggtctcactgtgttgctcaggcagatctcaaactttgcttgtattctttttttttttttttttttgagacggagtctcactctgtctcccaggctggagtacagtggtgcaatcttggctcactacaacctccgcctcccgggttcaagcgattctcctgcctcagcctcctgagtagctgggattacaggtgcacaccaccatgcccagctaatttttgtatttttagtagagacggggtttcgccatgttggtcaggctggtctcgaactcctgactttgtgatccacctgcctcggcctcccagctgggattacaggcgtgagccaccgcacctggcccacttgtattctttagagtgtaccaagtatgcacacattttaatgctatttaatggtaatgtaataaactgaagaaaatcctatcaccagatagtgtccaactttgaagctttagtcacaccaagccctgctgcaacaacgcaccctttgggaagcagacctttggttaaaggttttgagtttactccagttttcactacaagcaaagtggcccagacctttgcaaagaaaccacctagaagagagctcaccccaccaggtgcagtggctcacacctgtaatcccagcactttgggaggccaaggcgggcagatgatttgaggtcagcaactcaggactagctgattaacatggtgaaaccacgtctctactaaaaatacaaaaaaattagccgagcatggtggcatatgcctgtagtcccagctacatgggaggctgagtcaggagaacagcttgaacccatgaggcagaggttgcagtgagccaagatcgcgcgccactgcacttcagcctgggcaacagagcaagactccatctcagagagagagagaaagagagagagctcaccccatgtatatttccacttgggagcatcatctttccaagggccactttgaggtgaaatggcttttttacatactcagcatcaatttggtcctaaaatcaggagacattcacccttctccaccccaatttccaacatcccctcctttgtagagagagcactctggaagccactgagccccatagccctagggcctagaccactattccaaaagggaagacttttccattactatgacagacacccaggctggagtcctctgcctgcactcaaagctctaaccccaacctctttttccagtgcaaacccttctactcactaaaaatttctctccactcaaactagcctgtttgcccttccctgaacggggcttgtgttttcccatcagctcaactttgctcacatgcccagctcaaaaccacatttccacaggccagacaagtgctcagttcttcccacacgtagatgagtgctctgcctcctgagagcctgcttagccctactggacactgtcttgttgcacttatcatctgctgccttatattgaaggccttcatatgcctctcctgcctccaccccctgcccttctaaatttcaaactccttggccgcacagactggtgcactgtttccatatccctcacgctatccagctcagcacttggcaaacattagctcaccacaagaatgcatcctcaggtttttaagtcagacaagggcttcatagcagttctattgacattggggatgaacagttccttgcggtgggggctgttctgtgcattgtgagacgctcagcagcatccacgtggcctctttccactagatgccaatagcagccttccctctctcccgtccccaccccggtatgaaaaccaaaaatgtctccaaacattgccaaatgtcccctgggcggaaaccaccctcagtccacaaccactactctataccaatagttctccacctggccacacattcagactcacctgaacatttacactcagcctggaagtcagggggacctagatccaaatcctagctctgtcactccctttgcaaccctgacaagtcgcttcacttttttttaccctgttttatcgtcttaagatgaataaatatcccttctcacaatcttgttgtgaagattaaatgatccgcagcgtgacctagaaagggtttaataaatggactgtgtagaatttctaagtcgctcctaaagcacgagggtgaggaactgcggaaagttctctgcgccgccaggaggcgccatcataaaccacgtcggtgggtggccgccaggctccagctttgtttcccagccaagcaaactttgcaatgtgggcctgagtctgagctacttcgtagctggaggaaatgacactcctcctcatcccccaaaataattctcaaaataaaatcgaatcttattttatcttttcatgacatacatgctcaatatgcttttcacaggggagagggaaaaaagaaatggatgagaatatatgaggatattatgaaagaaatcatattttatatgatttataatagatgactcattacttataatattacttgttaatcataaaattacttataataatagctgacatgttttaagaactcctgtgtctcaggcattgttctaagcacttcacatttatctcattttatcctcacagaaatcttatgcattttacatttttttacttttcatttttcagactttcaaaaatattgtaaaaatagtcagagttccagtatatccttcatccagctttttcaaataaccttaactctaaagcaattatcaaaatcagtcacctagcattgatacaaaaaattttaaaatatagaaatatggggccgggcacggtggctcacgcctttaatcccagtactttgggaggccaaggagggtagatcacgaggtgaggagatcgagaccatcctggctaacacgatgaaaccccgtctctactaaaaatacaaaaattagccaggcgtggtggcaggtacctgtaatcccagctactcgggaggctgaagcaggagaatctcttgaactcaggaggtgggggttgcagtgagcccagatcgagccactgcactccagccttggcgacagagtgagactctgtctccaaaaaaaaaaaaaagaaatattaaaattttgctaatcatcccagtcatgtcttttttctgctccagagtccaacccaggatcccacactgaataacactgtcacatttcctaggcctcctccaacctgggggagtttcccactctttccctctctcaggaccttgatgcttttgaggaggtctggtcagttgttttgtagaatgcccctcaatttgggtttgtctcatgtttccttgggatgtttcaggttatgcattttgggcaagattagcacagaagcgatgtgtctttctcaggacatcccagccggagccccaggatgtctatatctctcattaccgatgaggttcactttaagcgcttggttcaggtggtgtctgccaggtttctctactgtgaagttactattcatctcattgtaattaataagtatcttgtggacaggtactttggaaatatgcaaatagccagtttgttcttagcatacttttaccaattaatttctagaatccagagataattgtagccgataaacaattcttactgtggtgttagccagtgattttctgcttccatcattgcttctacactgattaactggaacgctgctgtaagaaagagctagttcttctttctcatttatttatgtattcacttatttatatatatatcagcatggactctcaagtatttatcggttggactacattactattattattgattatgttgctatattgtccccaaattggccattgggagcttcttctagttggcatttgtgatactttccacacatccccatcatttttcaagttgtgccttactctcaggccccgcaagatgctccagtctcctcttgtggtttcctgccccagccctggaatcagccatttctccagggaaccctggttcctttcatgggagaatgatgtttacagaccatgggcgcccatatgcccattgctagtaggtgccggtgcttctatgccctctagtggtcagagctgggaaataacacacccacactagtgtactgttacccacatttcacaaattaggtaaatgaggcacagaaaagttaggcaacttgaccaacatcacagagaaaataggtagtggaactgggaaatgaaaataatgacagatgcaccacaagttctaacaagcaaaagtagctttttcacacatccacatcagcagaaagccacaagcccaatattccggcgtagacactctttgaaaaccagaattccacagcaataaccacgatgacaaccaccatgtactcaacacccgcctgggcacggggctcccacagcagctcacttattcccaacaactctgcaaggaggattttaccatcctccttttacaaatcagggaatcaaggatcatagaagccacgtgacttgtccaagtcaacatagttaagtgacagaaccattagctgtccccaggtacatctggacataaagttcatgtttatgccactgtgtcagcatttccaaaaactgattttaggcgaaacgtaagtaagctttttaaaaactttaatacttatgcgtttattttaatatacattgagaaaacatttaagcacacatcaaatctgtaatttcatggacaatattgcataagacaaggatgttttgtctccaactcctggcctcaagccatcctcccaccatagcctctcgagtagctgggatcacagatctgagccaccgatccctgctaggacaggatgttttgtaaactaaatttatttagaaaaaaggatgaaatatataataataaaggtggtacaagctagagagaaaatcataaagtcagcctagaaatgtctggtgtctggatgacataaagctacagcactgtgaagcctcattctcagttactcccaggaaattagagtcacataatgctgcagaaagaacagctcagaatcttagatccgggctttagccctagatatatccatttgtaggaccccagacatctctgtgacctccttgctgggagtaaatccaaccttcccagacatgtgagaacagtaagaagaccctgcacacacaaaggagtttctccgtcacagagaaaataacaccaggttcagggaccccagggactctgcatggtgctgacagacccaaggccaaggcagagcagaggtccacgctggggagggagggtcatcctgttatgaaacagggatccaagtaagccttgcttctcagagcctggtctggggaactcaaatgtagacagaagggagaaaggaagaagagaaaatgaggcaaaactgagaggggaggggacagagaggtgacctgggcagagcttcacccatgaccctggaaagtgctcctgccctgggaggaggctcagcatggaaagaggaaggacagcagagcctaagtcacagtagccctgactacagcattcctggagcccaggctcttttccacagaggaggaaagagcaggcagcagagaccatggggcccccctcagcctctccccacagagaatgcatcccctggcaggggcttctgctcacaggtgagtggaggattcctgggagtgggcaagaggagggatcacagagaatggctggggtctcctggggaggatggggctctgataggggacagaaggcttctgctgaagcctcaggggagagaacatcagagagggacacgggtcacaacaagacaatcacattgaactgggattgataagagggaggaaaatccattgatcatgttttccaagttaatcattactggccactacaattagaaaatgataagaataagaattacatcagggtgatactttaaataaaaatataaccagggcactaaaacctgtctttgaccaccaaccacaagttgcaaaataaccaccactccttaactcatccaccagtatttgcaatcaaattttaggcactggcgtacaacaaatatcagacaagtctctgtgttcaaagagcttacactcttgcagagatgaagatagacacccaaagagatctagaatgtgagttcaggtgttgacaagagccctggagggaacagagcagaaaaaggtcagaaagggaagacccagggtctctagaggaggtgtcaggggagggatctcccaaggatgccctgatgtgagcaggatctgagggcagtggggagggagccatgcagacccctggggaaggggattccacacaggaaaatgccaaggttagaggtgctgaagaaagaaaggtcacgttactgaccttgaccaagtgggacacacatacactctccaaggctgaagggtgaagagactctctcaggacccagggccccatctttccatcccaatacatgggtcccaatattgactgatgctttctccctcctagcctcacttctaaacttctggaacccgcccaccactgccaagctcactattgaatccatgccgctcagtgtcgcagaggggaaggaggtgcttctacttgtccacaatctgccccagcatctttttggctacagctggtacaaaggggaaagagtggatggcaacagtctaattgtaggatatgtaataggaactcaacaagctaccccaggggccgcatacagcggtcgagagacaatatacaccaatgcatccctgctgatccagaatgtcacccagaatgacataggattctacaccctacaagtcataaagtcagatcttgtgaatgaagaagcaactggacagttccatgtataccgtgagtatttccacatgacctctgggtgttgggggtcagttctacttcccacatatgggattgtcaggcctgggctgtgcctgtggccctctctgcattacattctgtatcagggtttggacatttagtgcaggacacacacgggggagacaaacttccacagatcagaattcctttcctgcatccagaccctgcagacactcgctgcagaggaaggacagtctgatggggggactcagcagggcaaggtcagtgtcagaaaagaaccccatggtctccccatggacctgaccctaagaaagaccctggagaactggatcagggcctggcctgaggggtccccctaggattctcagagagaagctcaactcttcccagaactgagcccctgtgcaaatccctgtcccagattcctgactccaggtgaccctggggaccctagggatcctgtgccagggctgagtgaggcctcctgggcagggctgactgggagcaagaatttaccagctgtctgagggtcgtggctcctggagttggtcaccagccagggtccagccccaagaacctctcctgggcaaggacagggcctcatcctttacctgagactcagcatggagtgaacagatggacaagattactagggcatgagcccactgcccaggggaacttagatgactccatgggaagttcagtatccccagggggaggaaaaagaagagagaagatgctcccagcagctccttttccacaagggatcagactcagggacctctcttttggaggcaaataagcatagatgctgttcctttgggcagctcctctatacacagctgaggtcaagtaattgtaaatattttgagattaattcacaaacaacgtcacagccaaatagcacttatcctacttattgaaaaaaaaaattgaggaacagggagacagtcaccgactagggtcacacaagtcaaaggtgtcagattagagtcacacgaggtctctctgcagccacagctgcctcttctccaccaggggacggctggcgttattattagacatctgcaggcctgagaccagtcctaagttctctttcctttttcttgggcatccacatctcagagggggagattttggtctggagagtaaggggcaaatggaaaattaatcaatttttcctgatatagtttggatgtttatcctctccaaatctcatgttgaaatgtgatccccaacattggaggtgaggcctggtgggaggcgattggatcatggggggctgtttctcatgagtggctcagcaccatccccttggtgacaagtcagttctcactttgagtgcacaggagatctggttctttaaaagtgtgtggcgcctccacactctctcttgctcctgcttttgccacatgacaccacctgctcccccttctccttccaccatgattgtaagcttgctgggtctcaccagaagccgagcagacgctggtgccatgcctgtatagcctgcagatccctgcatcaattaaatctcttttctttataaattacccagcctcagacatttccttatagtaacaaaaaatagcctaacacattagcctaacctagaactaaatcccttgtgtcaacagagtcagtgccaggaatgtccgggcctccctctcagatgcgcaccactgccctcactcgacctgaaatcctgtgtttcctgatgtgtcagtgacactcccacaggaggataaaacactccccactcacaccctgcaccagcgcagggcccagtgagagacacacactcagtagttctctgacgaaggagggaaggaatgaatgatgaataattcttaaactcttcagagaccggatcttggatgcagaatcctataaggttctggccacacctgtttcctgtccctccaggggccgggatccttgttgcattcctctaacccctgcccctaaagctaccccaagaaccgcatctcatgggactctggcacagctcacctgtgggaaggttttcaggtctccctggtcctggtttgtgggcggcaggtcacccaggcgccgaggcaagagaccaaggacacgagctgttccagtataataaaatataaaacaagaaaagttataccagatatagatcttagatatgattatatgtgaatatcattaatcattagttggtagcaattactctttattccagtattataataatcctcgctctataatcacaacctaggaaaagccaggccatacagagataggagctggggagacatagtgagaagtgaccagaagacaagagtgcgagccttctgttatgcccagacagggccaccagaagggctccttggtctagcggtgacactagcgcctgggaagacgcccgttgccaggcagaccgaggtctagcggtagcgtaagtgtcaagggaaaacacccgctacttggcagaccgggaaagggagtctccctttccccgggagagtttagagaagactttgctcctccacctcttgtggagggccagacaccagtcaggtccactcgcagttatccggaggcctaaccgtctccctatgatgctgtgcttcagtggtcacgctcctagtccgccttcacgttccatcctgtacgcctggctctgccttctagatagcagtagtaaattagtgaaagtactaaaagtctctgatatgcagaaataatggcataagctgtctttctctttgtctcctctctctctctgcctcatctgccaggcagggaagggccccctgtccagtggacacatgacccacgtgaccttacctatcattggagatgactcacactctttaccctcccccttttgctttgtatccaataaataacagcgcagtcagacattcggggccactaccagtctccgcgcattggtggtagtgatccccccggggcccagctgtctgttcttttatctctttatcttgtgtcttcatttctacactctctcgtctccgcacatggggagagacccaccgaccctgtggggctggtccctacactggttctagaataaccaggggtctcctggtccctagggtctctgaggtcactgtagtccccacagctcactgtgatgtaatctctggctatctctgctaccccttgtcccttatcttcctcccctttcacaccagtgaggatgcccctgccctgcacagcttcctccacccttaggtcttccccaggaactccctctaacaagactggctgttctgttcccttcccactcacactgtggcctggcccacctccggggcaataaaaaaaggcacagaaatcagctggatcagagcccctgccaggcttcatcatgagccagtgtccccaggccaccaggagaacgagcttccactgtgtccccacccagggctctttcccttcttgaggccaacatgtggaaaaggccacaggacagggacgagcgactcctccacctactcttgtaatttcccagcaggtttttcctgccactgcacagacaaaaccaattcactgagaccacgatattgcagtcaagaaagagtttaattaatgctaagtaagccaaacagtaagacaagagtttattattacttaaatcagcctccctggaggcttgagattagagtttttcatggatagtttgatggcaggggactagggaatggggaaagctgattggttggggataaaatcatagggatgtggcaactgatcctggtgtgctgaaactgcctctgagtgggggccacaagaccactgaatcatgggtcacagtccaggtggagtcagtcagttgccagaatgcagaagtctgagaaacatctcaaaagaccaatctcaggttctacaatagtgatattatctatgggagcaattagggaagtcacaaatcttgtgaccctcccataatgctgatctcgtaatgtttcattagtttacaaaggcaatccctgacaaagaggaagttagttttagggagggactataatcatccttgcttcaaagttaaactatacactgaatttttcccatggttagcctggcttgtgcccaggaatgagcaaggacagccaccttgaggctagaagccagatgaagtcagccatgctagcttactctcgccatcttaatccttgcaaaagtggtttcactctctacaatgactcaccaggggtcagaggcaagaggagaggtctgcagtccccaaagctcatggctcatttcacccatttccctcccgactccaccctcattcagctatggggctcccatcctccagtcattccctagagacttctggtgtccaatttggcatgtaagaagcttgaaatctgtcactcagttataacaagtataaaactgaacaaactgaaaaatcaacaactcttttagatccctcagagaagctaggcctcggtgttaattgccccgcatattggagagaccgacaggcaaagatggagcagcacacctcacctgggcagaagcccagggacagaaaccctgcagaaccagcgctggggtcagaaatctgaactgtaactgacaaattgctggaggctcagcatggacatgccccagagttaaactaaacactccaggggagggatcaatcttggggctgggacaaggagggactcttttgtgagtcttaactcctagagctaccagattctcatagtgaataggcaacaaagatcccctcctccttcctgaagcgggagggggaaaggaattatttggaaagatctccgtgaattctattcttcttagcaacagctgcctttaagagaaacttttaccagagcctgacctgctggggttttatgggagcctaactggcctggcagtgggtaaatgtccaactccagccccctgtagccatcatgtcccacctaagggggcaaaaatacagagagtcacttatgaagttcacagcccaggctgcagacctcatccaggaccacagaacccttccctcccaacactcaccacagcgtcactgaacacctgctcacccaagttccttttacccagaatatcatgtctggctttcaacaaaactgcacaagacagactaaggcaaaaacaaaaaaaaatgcaatttgaaactcagaacaacaatcagaaccagactcagatgtggcagggatgttgaaattagcagaacgggaatttaaaacaactctggttaatacagtaaaggttatgatggaaaaagtagaccccatgcaggaacagatgggtgatgtaagcagagagatcgatattctaagacagaaccaaaagaaatgctagagataaaaaaagaaaccctcctgtaaggtaaatgaagaatgccctcaatgggcttactggtagcctggacacagctgaggaaagaatctctagcttgagggtgtgtcagtagaaacttccaaaactgaacagcaaagttttgtgtgtgtatgtgtgtgtgtgtgtgtgtgtgtgtgtgtgtgttgttttgtttgttttttttttttttgagacagagtctcgctctgtaccccaggctggagtgaagtgatgctatctcagctcactgcaagctctgcctcctgggttcacgccattctcctgcctcagcctcccaaatagctgggaccacaggcgcccgccaccatgcccggctaattttttgtatttttagtagagacggagtttcaccgtgttatccaggatggtctcgacctcccaacctcatgatctgcccgccttggcctccaaaagtgctgggattacaggcatgagccaccatgcccggcctgaaacagcaaagctttaaaagagtgggaaaaggccgggcgtggttgttcatgcttgtaatccctgcactttgggaggctgaggcgggtggatcacctgaggtcaggagttcgagaccagcctggccaacatgatgataccctgtctctactaaaaatacaaaaaattagccaggcatgatgacagatgcctataatcccagctactcaggaggctgaggcaagagaattgcttgaacctgggaggtagagattgtagtgagccaagatagcgcgatttcactccagcctgggcaacaagagcaaaactctgcctcaaaaaaaaaaaaagagtgggtaaaaaaagtggaaaagcagattcaacttcacattcaagattttgtattgacaatggcatattttatattttctaaaagctgtaacatacatgtaatgggaatactggtggttcctgggaccaggtggagctggccagccctgtgctgtctgatgggcccactgcttgttccacacacatgtgtccctcatgatgatgccattatcataagatggggtcttcgggtggggagatgcaccagccaccggcatctcacttagactctgcccaattcgggctaatttaatcaaattctagttgtgtttcctgaggcgtaaagaaaaggaggaaggtgtttcatatgcctgtttaggccccttcctattttgcctaactctgcacaggaaattgaggtgagggctcttttgacatttactgacatacacacatcacatctcctaatttggtatttttcttttctgtgtattattgagacatctcagactttccctctgaccagttctgtcttcctaacaggactcacaattctctctctacccagagagtcactgatttcaaaccaaagtcagcatctttctttgagcttaacatgattatgctggtcttcagcatttagcagacctaaaccttattatgttatcaagagaaatgctacagcaaccaattgacctcagacctttcgaccattaataataatttccactgatagaaaaaaaattaatttcccccaaatttcttttttttttttcactatagtgagatcataactcctttgtctaaactcctgacaaatttttaagggcaaaatggactattacagatggagaatcccaaatccaaaaatccaaaatacaaaatgtgccaatatccaaaattttttgaccactggcatgatgttcaaaggaaatgctcactggagcattttgaaattttagattttcagatttgggatgctaaaccgatacttgtaatacaaatattccaaaataaaaaataattagaaatccaaaacacttttgctcttatgcataagagatactcaaactctattaattatagacaccaagctgtacagcagatctctagaacctccatattttgcataattgaaactgcacacccaaggaacaactccctgccagcccttggaaatcaccactctgctcttttattcttttttcttcttttttttttttttttttttttttagatagagttttactcttgtcacccaggctggagtgcaatggtgtgatcttggctcactgcaacctccgcctcccaggttcaagcaattctccctagccttcttaagtagctgggattacaggcatgtgccaccacacctggctaatttttgtatttttagtagagacggggtttcaccatgttggccaggctggtctggaactcccgacctcaggtgatccgcccgcctcagcatcccaaaaggctgggattacaggcatgagccaccgcacccggtctgcattctactctctgattccatgagtttgactactctagggacctcgtattcgtggaaccgtacagtagttgtccttgtacgactgacttctttcacttaacataatctccaatgggagaaaatatttgcaaagattcttcccaaatgtctctctcatatccatcaaacacagagtccatgaggaccagattgccagcagcttcatgctccctctttccaccagtcagttctgcatttgcaaacgttcatatgtatttcttattaagttccacggagtcctcacctgccctctgcaggaggagaaaacacattaaggactgaggacagagaacatggttctgctccaaagccaccagctcctgcatgtccccgccctctttctaagttgggattctactcttcctgttgttgttgtttgttgttgttgttgttgttgttgtttgttgtttgttgttgttacggagtcttgctctgtcactcaggctggagtgcagtcgtgtaatctcggctcactacaacctctgcctcccaggttcaagtgattctccttcctcagcctcccgagtagctggaattacaggcatgctccaccacacccagctaatttttgtatttttagtagagactgggtttttcgccatgttggtcaggctggtctcgaactcctgacctcaggtgatctgcccacctcggcctccccaagtgctgggattacaggtgtgagccaccgcacccggccttctactataccttttactgactcactgtctcatgtcagtcaccatgatatacctggaaagaataacctcaccttgtaattctgagacctcagcaccagcatgttccaggtgaggaccccaaggtcagccaggcagtcagccatcagggaaggaacaggagaggtgccaggggatgtgactcctggtcctgtgtctgtccaacacccaatgctgctgcttaattcacagttgagaaagtctcttcttctttcacaggcaggcagcctcacagtctctgagccctcagacggtcatgcatctgtctgtgacacacacatctgtcttcgtctttttttgtttgtgtgtttgtttgtttgtttgcttgtttgttttgagagacagagtctcactctgtcgcccaggctggagtgcagtggtgcgatctcggctcactgcaagctctgcctcccgggttcacaccattctcctgcctcagcctcccaagtagctgggactacaggcgcctgccaccatgcctggctaattttttgtattttttagtagagacggggtttcaccgtgttagccaggatggtctcgatctcgtgacctcgtgatacgcccgcctcggcctcccaaagtgctgggattacaggcgtgagccaccgcacccggccttgtcttggtcttttaaggagtggagttggccaaagaataggagatgttgattctgattaaaatatgcctgtggaggaatcacaggtgccacacagggcaatcttctctctgttttctgcacagcggagctgcccaagccctccatctccagcaacaactccaaccccaaggaggacaaggatgctgtggccttcacctgtgaacctgagattcacagcacaacctgcctgtagtgggtaaatggtcagagcctcccggtcagttccaggctgcagctgtccaatgacaagaggaccctcactctactcagtgtcacaaggaatgacacaggaccctatgagtgtgaaataccgaacccagtgggtgccagctacagtgacccagtcacgctgaatgtcctctgtatcttctgttcctctgtggcccaggcttccagcccaaatccacacagccagaggccaggcctctcagtccctctcaagtccagggactcagactctcacccaggctggccatcacttcctgtcccaagcaaacctgggcagacccagccttgaccaagaataggaggggagaggctgctcctgtcctgggaggctcagggtccacagcctgtgatgggagaaacaggtgaatatctcagacccagactcagtggacagattgggtttcgttaggacttcaaggttgtgacttggctcacagggacactgtggctcttccacagaccaggagcttccccttccctttgatgatatcatctatgactttattctcgctactccagatggaccgggcattcccaccatttcccccccagactcctattaccatccaggggcaaatctcaacctctcctgccacatggcctctaacccacctgcacagtactcctggtttgtcagtggaatgctccagcaacacacacaaaagctctttatccccaacatcgcagtggataagagtggatcctatgcttgcctcgcccataactcagccactggcctcagtacaatcacagtcaagacaatcacagtctctgctaagtggatccctggagcataggccctgagccctgggtaaagccactcagttttctgaaagagcctagaagtttatttcccagcccatgtcttggacacaagcaaatcccaaactctaccctgagccctctcactccacctctgcaggacccctcctccccttgttgttctgatttctcacagctgaccttggggccagcctggaatgttgtacaaattttgttttatcacttacgagttctgtgaccttccttgacttactgaggtgctttaagtctcagattctaactctgcagctgggggtgatgccccctctccctcaaggtgatgtaaggatgagatgagttgtaggtaggttggtgcccactggaactggcacatggaaggcccctgaaaacagtcaatgaacatcatccctgcttatcagcattgagttgatgccaagggcctgccctttgtgagtgtcatgggatggaaaaggagaaacagagggaagaggcatgatgcgagaggaaggagggactaaaaggcacaggagcagggtgaggtgcaggcacctctgggacaatgtatgagttggtgccgcccagtgtgtcaagcctgcagaaaatggtgccaccatggaaagcaagggaatctgtgatgaggacaacacaagagactacactcaggccccatggcatctccttcttccctgactgcacaccttccctgcaaggcccctgtggtttcctctgggatagacttgggcctctatcccctttgccttcttctttctgcagaagaaaatgccccaggccttcctgtgggggccgtcgccggcatcgtgaccggggtcctggtcggagtggcgctggtggccgcgctggtgtgtttcctgctccttgccaaaactggaaggtaccacagctttttcccatccttctcccaccccctaggctgactccaggccaaaagaaaggagaccttgtcctgtattcagggccaggctctccacggcctcccaagtccccagggatccttccctcttattccacggctcctccctcgtcagctcctgaccctgggttgctgcctcaacagcttcctcctctgtgaatttggcccaattaaggccccacccctgagtgtggccctagttccctcacacagcaaagccacagctgcctggagggagggagagaaggagggagggaagtagggagggagggagggagggcgtgctctgtacttggtacctcccattgttcattgaatccatccacacagtgagggggatttgcaggctccggatcctgggcaccgtcacacaatggggagtggaccagcctggacaggctgggtggggtcagtgccccccatggctgatgtggtaaccataggccctgaggtgtgagatgggagaacctgggcctcagaacagcatgtcctggagcgtcctttgtgtctcttgccaaggggttgagagagaggacaaggacactgtcccatttcagcatcaccagccctgagtgcagggtctggccacagcagggacactgagttccaggagaatccaagacacttgcggtcccctccgtgtcctgcacacgtggccctgctttgcctctggggacttgacccttcctctcaggcaaaccctcgtggtctgtttccttccttgggtcctcagtccctttcctgggtccctgggtcaatgttctcctggcccggcatctgcctgagggtccttcccctctgctcaggacagatgtgggttcctaaagcctttcctcaactcccctctgctgggctccccctaacacaaacctgagggagacaggaggtctccatgcccatccttgaaaatgggtttcccttcttgtcccctgttcgaactccaaagttgtggcttttaacctggcaccctcccaaatgaccctgacctttcctagaaccagcatccagcgtgacctcaaggagcagcagccccaagcccttgcccctggtgagtgtcctctcagcccaggtgtggctgggaacccctaggacagccccacagtgtccgctcctgccagtcactgccaggcagactctgatcctttcccgggggctgcaaggaggatctcataaaacatcacacaggggaccccaattgcttgggtcagccctcacctgtgggctctgggtcatgggtcacctccccaacctcagctgctcaggtatcttagagctgaggaccccctacgccttcctggagaggggataaggctctcctcccaccctgctgctcactcctgtctctgtttccaggccgtggtccctcccacagctctgccttctcggtaagcctgtccccttccagcccctttctactggggtcccagctgtgcaggctctgggcagagggaccatcagccccccagcacagaacagacccaccttcccccaaaacacacaggacaaggctagccctgccctggccaggagctgggcctccctacagggtcaggaccacccacgccctgtgctgacccctccccgggaccctccatcacctgaggagacccctggagtgcagcaggtgcagagtggacactgggaccatcagtcaggggcccacattaacaagggtgcagggtgggcccagccaggaaaagggtcagggtgctgtgtccacactgggaggctgagctcaggggcagagctggtcactcctgaggggaaatgaccagaagtaaacacagagaagtaaatcctggccaatcagagacaggaaacttccaggctgggcctccatgaccctccctccctgtccacagatgtcccctctctccactgcccaggcccccctacccaaccccaggacagcagcttccatctatgaggtgagtgtgggccacggatgttctggtcccacaggccccaggggacccaggatcttcccctactggcatcggctgagctctgagattcaggaaactgctgtgaaaataagaacgggggtggcgagcagaggagggaggggcttgggagcaggaaccccctgagcacagccaggttcagccccagagcagccctggatgggcccagagcctgggagacgccacaccctgttctgaggagactagaggggtccaggcctcttctctgttttaacaggaattgctaaaacatgacacaaacatttactgccggatggaccacaaagcagaagtggcttcttagcttcctccaggagctgctcctgtgtgttgatggagagtccccaaggcccccagccctggggatggggaaggacatgaagcctgagccagagaaccagctataagtcctgagaagacactggtgtctgggggcagggagggatgggggtccctgatgaatatctggagacctcgacagcctgccctaggccctgggtgggtcaggacaaaggcctctcatcaccgcagaaagcgggggcttgcagggaaagtgaatgggcctgtggcccacctggggtcacttggaaaggatctgaataaaggggacccttcctctcattagctgtttttctgctagtgggaacttagcaaaaattcgcctgaaactccatatccattctctcctgggtcacacaaggaaaatgtcatctccaacttatttcaaccccagtctctcttccctgggaggcagaaatagggggttgggagtcaggctggggtggaccctacacaggaaagggcaggattcacaggagacctgcccagccagctgagcgcttggctgtgctcatactgccccagggacccacggtgcctagccctggccactgggtttcttctctgtccaaaaggccagtgctcaggacatctttacccatatcaggggacacacagagggcctgtcagagtaatcaaggtgaggacagacccagaatttagtcctggagtaaaatcctcccagacactacctgggactctagcccatcatttcccatcagttcccactttaccccctggagtggatctcactgaacaatcctccactccacacaggagattccaggtcagagacacagggctctctcacctaaagctcacgcagtctaccatggcaatgggacaacctctctcctcttctccctggcctgcagggccctccactcaggcctcaccagcagctccaccacatacctgggccggcagttctctgtccctcctgagggccctggggagtgtaatgatctcatgtaggttcactcagaccaggtgtccccttcccacaatcaggctggtccctgcactaaagcacagagccacggttcctgagggtattctgccactgcccagggttgtttgccatgagatgggaagtaggaaaaacaacctgcaaatttacatcaggatttagctctaaatgactccttacctcacttgtacacatcgtcagatgagacaaggtgatgtctcttgtgtcagtttcctgttgatgctgtgacaaattcccacaggccaggcatgttggtttgtgtcttggtcccacttactcaagaggctgaggcaggaggatcgcttgagcccaggaggttgaggctgcagtgagctctgatcacaccactgcacgctggcctaggcaacagagatgacaactccattgttaacttagtggcataaaacaacaacgtgtccacttggctgtgttcttcctggcagctccagggaaaagtctgttccctcaccttttccaattactagaggccgcctgcatccttaactttggccccttcctccatcttcaaagcgagcagtacagcatcttgaaacctctctgtgctctgcttccatcctcactgacttccccgcctccctgtctcacttgtatggttattttggacccacctggataaaccacaataatctccccatctcatcatccttcatttatctgctaagtgtctttgaccatgtgccatattcacagatcttgggatgaggatgtgtgcatctttgagaggggcttgttctatccatctctcctctcaaggccattttatcatgattgttcactacaaagtacacatgggcacctggatagggttatcctgactgtggcatcagtttttgcagtgacgtcccagcaccctccaggtcctgagagagggagacggagggctctccatgcccctagtacctctccaccttctcctcggtgacaagcttagttgttaagaataaaagagatgtgtctgggcgtggtggctcacacctgtaatcccagcactttgggaggccgaggcaggcagatcacctgaggtcaggagttcgagaccagcctgaccaacatggcgaaaccctggctctactaaaattacaaaaattagctgcacgtgctggcgcacgcccataatcccagctactctggaggctgaggcaggagaatcacttgaacctgggaggtggaggttgctgtgagccaaaataatgccactgcactccagcctgggtgacagagtgagactccatctcaaaaaaaaaaaaaaaaaaaaaaaaagaaaagaaaagaaaagaaaaacaaagaataaaagagatgtgactggaagatcacaactcaccagcccttcaatcgttcatggacatcagcaccatggatagtgaccacggaagggtcatccccaggcactgcagcagggagcgcacagatggaaagaaactgccgggaaaagctgcccagtctattctgcctgagaaagacacaatgagggagaacctgattcttctctaatttatttgttgtgagccctgtgcacatgactaaatgttagggttgttggcaaaggttgttgacgcccctggcagggctgatttctgtacccaaagtatgaccttggagaggctgagtctgctctggtttcccagtgaatgtccctacctctgagactcaagccattgtctctgcctacaacacagtgggaacttttcatgattaacttccgacccccgtgcctgaccttggaaccactaccatcacccagcctggagcactgcctgagcacagcatcctgttccctgagctccagctaagcccctgggaagctgagctgaaccgagcccctgaacaatcctctcagtgactccaggccaggcctcgtgccccatgtcagaggcctttgccatctgccagtccttcccacacaatcctcctgagggacaagtggaggcctgaacatctgtctcccagggtagggcccaacttctccaggagacaaaaacagaccagagtcctcccagtcaccctcaccctcctcattcccaccacttcccacccacagaggcaactctggtcctacagacccacccctgcccttcccaagagctcaggtccagtcaatcagtgtccctgcaggtcacacacacacaccactcagagtgctcagtggaagggtcactcaggtccccaccgagagtctcccgtgctttggatgggtcagaatcctcttcacatcccacatctgggcagtcaacaaggtcttctctgcactgtcctcgcacctacagtgtctgtcttggtcatcctcgtcatcttttctgagcacggccacagctcctaacaagtggggttaaggctcctgacagatagggttaaggcataggaccgtgattctgagggcttctcaggtcttgcctgttatgtgaaattagcatgtacaacacatagaatttgtatgtttacctcataattttaatgtgcacaccctttgatcattaattagtcacattaagaagagcctcccctgaatcgtgagttctaaggaggcaggagtacacctgtcctggtctctgctaagtccagtgacaagcacccagtctggcacaaggatgcttcataaatacatgtggaataaatgagatcctcttacaccctgctcacttccctgacttatgtgaccagacggaaactcctaatgtacaggagagaaaggcagaaatgctggagaccagcgagaaagctgttttttgaaagagcagcaagttccaggcctctaaagatacttctggactttacgtggtgcagagaaaaagacaaaaccaatacattcccttcaaaccactaaagtgggtggggccatagcctaactgagaaagaaaaagaccaaggtagggtacagttcccctaacccactttgtttccagacatcaaaaaatacagtttgtggtcttggactctgatgtggaaaaagtacaaaccaaaaattgtgttaccactaatttccttgctatgagcagtcatgaaatatcaatgtacaaccatacatgcaaagatacaaattcaaacagcacttcagtgaacattcacaggaccagtgtcagaggtctgcaaactaactacatttgttttaactttgaatttttaaataattgtagattcacagaaacttgaaaaaaaatgtacttggaggcccatcacccttcacccagcctccaccaatgttcacattttgcataactataattcaatgtcaaaaccaggaaagcgacattggtacaatctgcagagcttttttcatatttcaccagttatacatgcatgtgtgcgtgcatacatgtgtgcatttgtgtgtgggtgtggatgtgcacgtgtgtgtctctatgctatgcggctaccacagtcacaacatcatatgttgccaccccttcataaccacaataccctccctgtcccataactacttctggcaagcactaatctagtctacatctctatggttatgttatttcaagaatgttacataaatggaattgtacagtatgtatgttttttttttgtttttttttgtttgtttgtttgttttttggagatagagtcttgctctgtcgcccaggctggagtgcagtggcatgatcttggctcactgcaacctctgcctcccggttttaagcaattatcttgcctcagcctcccaagtagctgggattacagggattacagacgtgcgccaccacacccaggtaatttttgtggttggctggttggtttgtttgtttgtttgtttggagacagagttccgctcttattgcccgggctggagtgcaaaggcgcaatctctactcatcacaacctctgcctcccgggttcaagcgattctcctgcctcagcctcctgagtagctgggattacaggcatgcgccaccacgcccggctaatttttgtatttttagtacagacggggtttctccatgttggtcaggctggtcttgaacccccgaccttaggtgatctgcccgccttggcctcccaaagtgctgggattacaggtgtgagccaccttgcacagccttgtttttttcttttttaagtagagacggtatttcaccactttggtgaactggtctcgaactcctgacctcaggggatccacctgccttggtctcccaaagtgctgggattacagggttgagctaccacgcccagccatcatgcagtaggtatgcttttggtttttttgctttttgttttttgtttttgctcttgttgcccaggctggagtgcagtggtgcaatcttggctcactgcaacctccacctcccaggttcaagtgattctcctgcctcagcctcccaagtagctgggattacgggcatgcgccacaacgcccggctaatttttgtacttttttagtagagacggggtttcaccatgttggccaggctggtctcgaactcctgacctcaggtgatccacctgcctcgacctctcaaagtactgggattacaggcatgagccaccgcaccaggccagtatgtatgcttttgatattggctttgttctatcagcaaactttccttgagcttcatccaagttgttgcaagtatcaagagttactcctttttattgctcaggggtggtatttcatagtactgcaatttaatcattcacccattgaaggacattgaattcctttttagtccttggctattgcaaataaagacactatgaacattcacgtacaagtttccatgtgaaaatacttttttcctttctctgggaagaatgcccaagagtacaatagttaagtcaggtgacaagcccattttaagttttaaaaaaaattgccaaagtattttccagaatgactggagccagcatgcatgagtgcaccagcagtgtatgagtgattcagcttatctgcatcctctccagcatttggtgttattattatttatggtaccccttctattaggtgtataatgatatttcattgtggttttaacttgcttttattttcttttttttttttttactggagacatagtctcattctgtcacccaggctggagtgcagtgatgctggcccactgcaacctccacctcctggattcaagcaattctcctgcctcagcctcccaagtagctgggattacaggtgtgtaccactacgcgcagctaattttgtagttttagtagagacggggtttcaccatgttagccaggccggtctcaaactcccaacctcaggttatccgccctcctcggcctcccaacttgcatttttaatggctaataatgttgagcatcttttcatgtgtttatctgcatattctttttgctgaaatatctatgcgggtcttttcctttttttttttttttttttttttttttttttgaggagtcttactcctgcccaggctggaatgcagtggcatgatcttggctcactgcaacctccacctcccggattcaagccattctcctgcctcagcctccctcgtggctgggattacaggtgcgtgccaccacgcctagctaattttagtatttttagtagagaaggggtttcaccgtgttggccaggctggtctcgaactcctaacttcaagtgatccatccacctcatcctcccaaagtgctgggattacaggcgtgagccaccatgcccagcctcttttcacattttctaattggattttttttttttttttttcttgagacggagtctcactctgtcacccaggctggagtgcagtggtgtgatctcggctcactgcaagctccgcctcctgggttcaggccattctcctgcctcagcctcccgagtagctgggactacaggcgcccaccatcacacctggctaattttttgtatttttagtagaaacagggtttcaccgtgttagccaggatggtctcgatcttcctgtgatctgcccgcctctgcctcccaaagtgcttgggaggtaccttgtgatccacccacctcggcctcccaaagtgctgggattacaggcatgagcctccacgcccagcctctaactggattttttaatgttgagttttgagcattctttatgtattctagacacaactccttggctggatatctgatttgcaaatattttctcccaatctgtatttgtcttctttttctcttaacaaggtctttcacagagcagaagattttaactttgatttaaaaattcatcagtatttcttttatggatcgcattttgggtgtcaagtctaagaactctcttctttcactttgtcgaaaattaacgcacatacctgtgcacacctatttctaagtcccctattctctcccattgatatatgtgtctatccctcaatcagtcccatgttgtcttgattactataactatatagcaagccttatgaggaagagtgatttttcccatcttattattccttttccaaatgattttggctattttagggcctttccttttccatataaattttagagtaagcttatctaggtctatgaaaaaaaattgctgacatttagctaggaattgcattaatgtagatcaatttagggacaatgaacatctttactgtcttgagtcgtccaattcatgaacacatgtctctccaagtatttagttctcctttgatttcgttcatcggcattttgtaatttttatcatatagttcctgtacatgttttggtagagttatgtccgagtatttcattttctctggagcaattgtaagtggtactaggtttttattttggtttccactagttcattgtctgtatacaaaaatgcaattgaattttgcatgttgatcttgtatcttgtgactttattgaactcacttattagttctaaaagatacgtttttgtaaattcctggagatcttttacatagataatcaagtcatcttcaaatagagacagttttatttattattttcttcttcttttttacttttcgagacaggatctcactctgtagcccaggctggagtgcagtggcacaatctctgctcactgcagtctcaacctcccaggctgaagcaatcctcctacctcagcttcctgagtagctgaaactacaggcacatgccacagtgcctggcttttttttgtttttatttttgttttctttttttttttaagacggcgtctcactctgtcaccctggctggagtgcaatggcgtgatttaggctcactacaagctccgcttcccggattcacgccattctcctgcctcagcttcccgagtagctgggactacaggcgtctgccaccacatccggctaattttttgtatttttagtagagatggggtttcaccgtatcagccaggatggtctcgatctcctgacctcatgatccaccctcctcggcctcccaaagtgctgggagtacaggcgtgagccaccatgccaggccgcctggcttttttttgtagagatgggatctcattatgttgcccaggctggtttcagactcctgagcccaagcaatccactcacctcggctctccaaacatctgggaccgcacccaggcatgcaccactgcacccagcctatttcttactttctttcttttttttttttttttgagacacagtcttgctcttgtcacccaggctaaagttcaatggcacgatcttggctcactgcaacctccacctcccaggttcaagcaattctcctgcctcagcctcccaagtagctgggattacaggcgcccaccaccatgcctggctaatttttgtatttttagtagagacagggtttcgccttgttggccaggctggtcttgaactcctgacctcaggtgatctgcccgcttcagcctcccaaagtgctgggattacagctgtgagccaccgcacctggccctatttcttactttctagtccatatgtatttatttccttttcttgccttattccagtgctgaaacttccagtagtatattgaataaggatgatgagagtgggcacccttgcccttttcttagtattagagggaaaacattcagtcttacaccattgaaagtgcaaccaggcatggtggctcacacctgtaatcccagcactttgagcggccaagttgggcagataacttgaggtgaggagttcgagaccagcctggccaacatggtgaaacaccatctctaccaaaaatacaaaaaaaaaaaaaaaaatagtcgagtgtgctggcctgcacctgtagtcccagctactcaggaggctgaggcaggagaatcacctgaacctgaaaggaggaggttgcagtaagtggagatggtgccactgcattccagcctgggtgacagagcaacccctatctcaaaaacaaaaaaatttttaaggaatgatgttaaatgacagaagatgagaaagacagcagagtaagtctctccagccattatctcccagcagaaacatccatttgagcaactatccacacacaaaattactttcacaagagccaaaaaaaaaaaaaaaactcgaacacacgagtgaagctgggaagcgcccttggaccacaaagacaagcaaaaccacggttggaaggtaaagggatcagttctctgtgcttgcaacatgcctcccctcaagccattatggcaccacacgtggaaactccccatggacccatgatttttacactggaaaaactgagctaggggtggacatacagattccccatcattccgggcccctccacaaaagactcactcctgtattggcccatagagaacactgcaagtacctaaggccagttaaagacaaaaagaaggggtggggttgggcagccactgcaaggaatttggcagtggctctccatccctgccagaggagatgctgcaccaaagacactgtttacagaaaccatgctgcaggaagcatggtccacagatcctctggccttgagggcctggctggttctccacagggcccaggtgccctctgtggctctcccacctgccccatccaggtccgacatttcatcagcagtgaagctagtgccagactcgcctctaacctgggcttagggtaccccctagtgttgaaatggaagacaacagtcagtccactcacaatttctaaataagcccactgaaatagaatggtcacaaacaaactcaggctgtaaagaccgtaataaacacctaattcaccaatgcatagatagagacgcagatctaggaataagaatagcctaggaacgtgcctcgtcaaatagacagaacaaaatgccaatgaattatcctaaaaacatgcaaatgaatggtctggcaggcaaagaattcaaaacggctgttttaagaaaactcagagaacttaaagaaaacatagagaaacaattcagacgtttgtcagagaaatgtaacagcgaaagtaaaataataagaaacaaacagaaaccttgaagctgagaagtacaatatgaaatgaaaaatgtgccgggcgcggtggctcatgcctgtaatcccagcactctgggaggccgaggcggacggatcacggggtcaggagatcgagaccatcctggataacacggtgaaaccccgtctctactaaaaatacaaaaaattagccgggcgtggtggcgggagcctgtagtcccagctactcgggaggctgaggcaggagaatggcgtgaacccgggaggcggagcttgcagtgagccgagatcgggccattgcactccagcctgggcgacaaagcaagactccgtctcaaaaaaaaaaaaaaaaatgtgtcgggcatagtgctgcatgactatagtctcagttattcaggagaatgaagtgagaggatcacttgagtccaggagtttgagaccaacctgctcaatatagtgagacccccgtctctgaaaaaataaaaaatgtactgtgttcatggactggaagaattaatattgttaaaatgtccatactaaccatgatgaactacaaattcaactcagtctctagcaatatttcaatggcattcttcacagaagtagaaatataggccattcgcagtggctcgcgcctgtaatttcagcactttgggaggccacagtgggtggatcacttgaggccaggagttaaactacactgaccaacctggccaatcccatctgtactaaaatacaaaaattagccaggcacggtggtgcatgcctgtaaccccagctactcaagagggtgaggcaagagaattgcttgaacatgggaggccgagtttgtagtgagccaagatggcgccactgtactccaccctgggcaacacagcaagactctgtctcaaaaaaaagaaaaaagaaaaatgctcccaatactctgggaggccgaagcaggtggattacctgatgtcaggagttcgagaccagcctggccaacatggtgaaaccccatttctactaaaaacacaaaaatgtgctgggtgtggtggtgtgcacctataatcccagctacctaggaggctgaggctggagaaattttttatttccttattaatttcttcatttacccattggtggctcagtagtatgttgtttaatttccatgtgctggtgtgttttctgggattcctctcattattaatttctagttttatacccctgtggtaagaaaaatatacttacgccctgcctggtggctcacgcctataatctcaacactttgggaagccaagatgggaagatcacttgaggccaggagttcaagaccagcctgaacaacatagtgagattccatctccacaaaagtaaaaaaaaaaattagctgggcattgtggggcactcctgtaaccccagctatctggggggctgagcgaggaggatcatttgagcccaggagttggaggctgcagtgaactatgatctcaccactgcactccagcctgggcaacagagtaagaccctatctcttttaaaaaaagaaaagatacttaataagattcctacttttttgaatttattgagacttggtttgtggcctaagatatagtctactctggagaatgttccatgtgctgatggaaagaatatctattctgcagcagttgggtgaaatgttctgtaaatatcaggcctgtttggtctaaaatgtagtttaactccaatgtttctttgttgattttctgtctgggtgatctgtccattattgacagtggggtgtcgaagtccccagctattattgtattgcagtctatctctccctttagatctattaatgtttgttttatacactttggtgctccagtgttgagtacataaatatttataatttttatatcttctcactacattgacccctttagcgttatatagtgaccttctttctctcttttgatagtctttggcttgtagtctattttatctgatataagtacagtttcttatgatctagcaatcccactactgggcatttatccaaaggaaaggaaattatactgaagagacatctacaccttcatgtttattgcagcactattcacaatagctaagataaaaaatcaacctaggtttccaacaacagataaatggataaagaaaatgtggtatatacataaaccatggaatacattcagccttaaaaaaaaagaataaaatcctgtcttttggagcaacatggtggaactggaggacattaagtaaaataagccatgaacagaaggtaaaaccccacatgttctcattcatacgtagaagctttaaaaaaagttgatctcatagaagtaaaaagtagaacagagaatactagaggatgggaagggaggaatggaaagcaatttgttaaaggatacagaattatagctggataagaggaataagttctagtgctctataccaccgtaggatgactatatttaacaataatatattatatagtttcaagtggctaggaggatgttgaacattcccaacacaaagaaatgataaatgcttgagatgataggtatgctgattgccctgatccaatcactataaattgtgtgtatcaaagcatcactatgtaccccatgactatgtacaattgttatttgtcaattaaaaataaaatacaatgtttaaaaaataaaaataagtattgctactcctacacttttttggtttccacttgcgtggaattttttttccatcccttcactttcagtctacgtgtgtctttataggtgaagtgggcttgttgtaggcagtatgtagttgggtcttgtttctttatccctttagccaccctttttttttttttttttgagacagagtctcgctttgttgcccaggctggagtatagtggcgcgatcttagctccctgcaagctctgcctcctgggttcacgccattctcctgccttagcttcccaagtagctgggactacaggcgcccgccaccttgccggctaattttttgtatttttagtagagacggggtctcaccgtattagccaggatggtctcgatctcctgacctcgtgatctgcccgcctcggcctcccaaagtgctgggattacaggcgtgagacaccgctcccagcccattctgtgtcttttaaatggagaattgcatccattaacattcacatgattattaatcagtactgcagttttgttgcttgttttctggttgttttgcaactccctcttctttttctttctttcctattgtcttcctttgtagttaagtgattttctctggtagtatgttttaagtcatttatctttaagtgaatatattataggttttggcattatgattaccttgagctttacaaaaaacatcttatggattataacaaattaacttaaggagatgacaacttatcttagatcataaagaacagaaatgaagaaagcaggaaaaaatactctagactttaactcccttcccccaccccctacattttgactttatgttgtctcaatttacatatttttatatcgcctatctcttaacagtttgctgtagctattatgttcttgatatttttgtcttttgggcttcatactagagttattagtggattttacaccacagtgatagtttagagtacatattcatgtacttaattttatcagtgatttttacacctttaagtgttttctttttacatgttagtgttttttctttccaattgaagaaccgctttagcatttcttgtaagatgagtctgctggtggtgaattttctcagctgttgtttgtctggaagaaactttctctctccttcgtatttgtagggtggctttgctggatacagtgttcttggagagcaggggtttctaccttcagcactttgaatatgccatcccacccctacctggcctgtatgatttccactaagaagtctgttgcttggccgagtgtgttggctccatgcctgtaatcccagcactttgggaggccgaggcgggtggatcacctgacgtcaggagttcgagactagcctggccaacatggaaaaaccctgtctctaccaaaaatacaaaaattagctgggcgtggttgtgcacacctgtaatcccagctactcgggaggctgagacaggagaatcgtttgaacccaggaggcggaggttgcagtgagccgagattgtaccactggactccagcctgagtgacagagtgagattctgtcaaaaaaaaaaaaaatctgttgccaaattggaactcctttgaatattatttgcttattttctcctgctgcttttaggattctctcttcgtccttgacctttgcaagtttattatatgccgtaggatagtcatatttgggtcaaatctgtttggtgttctctgaccttgttgtacctaaatacttatctttttctagttttgaaagttttctgttttatttctttgaataagctttctacctcttgctcttccccaactccctcttaaacattaataatttttagatttggtttggagcattttttttcttttttttttctttttttttttttttagacagaatctcactctgtcaccaggctgcagtgcagtagcatgatctctgctcactgcaacaaatttttttgtatttttagtagagacagggtttcaccatgttggccaggctaatctcaagctcctgacctcaagtgatccacccacctcagcctcccaaagttgggattacaggcaggagccaccacacccggccagatttggtcttttgaggtaattttctatatcttgtaggtgatcatcattcttgttcattcttttttttctcctctgtgtattttcaaaaagcctgtgtttgagctcactgattcttttctctgcttgatccattctgctgttgagagactttaataaatttttcagttcagcaaatgtatttctcagttccaagatctcttttttgtttttttgtttgtttgtttgtttgtttttgagacaatgtctcactctgttccctaggttgtagtacagtggcatgatcatggctcactgcagcctcgacatcctgggctcaagtgatcctcccgcctgagcctcccaagtagctgggaccacaagcacacaccaccatgcctggttaattttttggttttttgtagagacagggttttgccatgttgcccaggctggtctcgaaatcctgagctcaagcaatccacctgccttggcctccaaaagtgcagagattacagtgtaagccaccatgcacagccagttctgagatttttgtttgtttgttttatttcaatatgtttgttaaatcactgagtttccttaaaactgctcttttgaattcttggtcagagagctcacatactgtagtctccttagggtcagtcactgattccctactttgtccaattggggaagtcatgattccctgtttgctgttgtttcttgtggatttacatctatgtctttgcattaaataattatgtattccagtcctgtctggatggcttgttttggttttcattagatgtatttgcttagagattctttgtaatttgtctgttgattttttttcctactaggttgctgcctcttttttggcagtaaatgatgccttaacccctggtttgccttggttctagtaaacaatcagagccaggcatggtggctcacacctgtaatcccagctactcaggaggctgaggtgggaggatcacttaagcccaaaagttcaagaccagcctggggaacataacaagactctgtctcaaaacaaaaacaaaacaaaacaaaacaaaacgccaggcacggtggctcacacctgtaatcccagcactttgggaggccaaggcaggcggatcacctgaggtcgggagttagtgaccagcctgaccaacatggagaaaccccgtctctactaaaaatacaaaattagccaggcatggtggtgcatgcctgtaatcccagctactcgggaagctgaggcaggagaatcgtttgaacctgggaggtggagattgtggtgatctgagatcgtgccattgcactccagcctgggcaacaagaacaaaactccatctcaaaaaaaaaaaaaaaaaatcaaagcgttgtccatcccaaatgagagaagtcccaaagggtcctggtagtgtgggaaggctggataagcagtttgtgctcaggacagctgtggaaggaacctgctatagcatagtgctgctgaaaagccactcatatttggtgtctcatttagccaaattgcagcgcagagtttccagaactgaagatggtagtgcagactcccccacccttgtctctgcctatcctcagggatatttctccctccaagcactctctgtgctttctgtggattgagaaagggtcaggtttcctgtcaggaaacccaagataatggggaggctatttgtccgtctccatctcacttttttcagtataaaaaccatgagtctagggaaattttctgtacacttggagcctggcagactcgggggaagggcatcatggatatggatttttttttaaattgcaagggtgagtcttacgtgtttacaaacaaaattatatgatttctgatatttaacccagggggtgaaagagtagatgagtatagatacaataaaatttgtcatgagtgtatatatatatatattttcgagatggaatctcgcttgttgcccaggctgcagtgcagtggtacaatctcagctcactgcaacctccaccttctgggttcaagcgattcttctgcctcagcctcctaagtagctgggactacaagtacatgccaccaagcctggctaatttttattgtatttttagtagagatagggtttcaccatattggccaggctggtcttgaacttctgacctcaagggatctgcctgcctgggcctcccaaagtactaaaattacaggtgtgagccatcacacccagcccatgagttgatatttttgaaactgttgatgggtacatgggcgttcactatacctttctcttcagtataataaactagagtttgtgggacaggcggagtggctcacgcctgtaatcccagcactttaggaggccgaggcgggtggatcacaaggtgaggagatggagaccatcttggctaacatggtgaaaccccgcctctactaaaaatacaaaaaaaattagccaggcgtggtggcgggcgcctgtagtcccagccacttgggaggctgaggcaggagaacggcatgaacctgggaggcggagcttgcagtgagccgagatcgcaccactgcactgcagcctgggcgacagagcgagactccatctcaaaataaaaacaaaataaaataaaaaataaactagagtttgtgtgtatatgtttgtgtacaaactctccttgtatatgatttgaaattttctatatgaaaagttttttaaaagagaggaaaaaaatatctagcccagaagagagaaaaaaaatagcccaaaagtttttggttctagtttcggttttgtgtttttgagacagggtctcactctgttgtccaggctggagtgcagtggtacgatcacgtctcactatagccttgacttcgtgcagcccagaagttttatcagtgatttctacagaattttcatgatggatcatctcaatcttatacaaactcttccatagggaagaaaaggaaggagtatttccccaactcattctattaggttagtataaacttgatattgaaaccagaaccaaaaaaagagtacaaaagaggaaattatcaggccaatcacattcatgaacagagatgcataaaaacctaaacaaggcattaggaaatcaaatcaacagcatatttaaaaatgaaacactatgactaggttttgtttgttccaggaaaagcaaaaaggtgatttaacattataaatctataagtgggcttttctgcccatggacgccgccaaagaagcatcgttagagtctcagttctccctgccgtcatgtctaagtcagagtgtcccgaagagcctgaacagctgaggaagctcttcattggaggattgagctttgaaacaactgataagagcctgagaagccattttgagcaatggagaatgctcacggactgtgtggtaatgagagatccaaacaccaagcgctccaggagctttgggcttgtcacatatgccactgtgaaggaggcagatgcgccatgaatgctaggccgcacaaggtggatagaagagttgtggaaccaaagagagctgtctcaagagaagattctcaaagaccaggtgcccagttaactgtgaaaaagatatttgttggtggcattaaagaagacactgaaggccaggtgtggtgactcatgcctataatcccagcactttgggaggccgaggagggcagatcacctgaggtcgggagttcaagaccagcctgaccaacttgagaaaccccgtctctactaaaaatacaaaattagctgggcatggtggtgcatgcctgtaatcccaattactcgggaggctgaggcaggaaaatcacttgatcccaggagccggaggttgtggtgagccaaggttgcgccattgcactccagcctggacgacagactgagactctgtctaaaaaaaaaaaaaaaaaagaagacactgaagaacatcacctaagagattattttgaacagtatggaaaaattgaagtgactgaaatcatgactgaccgaggcagtggcaagaaaaggggctttgcctttctaacctttgatgaccgtgactccgtgggtaagattatcattcagaaataccatactgtgaatggccacaactgtgaaattagggaagccctatcaaagcaagagatacctagtgcttcatccagccaaagagatcaaagcagttctggaaattttggtggtggtcatggaggtggttttggtgggaatgacaactttggtcatggaggaaacttcagtggtcatggtggctttggtggcagccatgttgttggtggatatggtggcagtggggatggctataatggatttggtaatgatggaagcaactttggacgtagtggaagctacaatgattttggcaattacaacaatcagtcttcaaattttggacccatgaagagaggaaactttggaggcagaagctctggcccctatagtggtggaggccaatatttgccaaaccacgaaaccaaggtggctatggcggttccagtagcagcagtagctatggcagtggcagaagattttaattagaaaacaaagcttagcaggagaggagagccagagaagtgacagggaagctacaggttacaacagatttgtgaactcagccacgcacagtggtggcagggcctagctgctaaaaagaagacatgttttagacaaatactcacgtgtatgggcaaaaaactcgaggactgtatttgcaactaattgtataacaggttattttagtctctgttctgtggaaaatgtaaagcattccaacaaagagttttaatgtagatttttttttgcatcgatgctgttgatcgctaaatgtaatagtctgatcgtgatgctgaataaatgtcttttttaaaaaaaagaaatatataagtggaagggggcatgagggagcttctagggtgctaggaaggttttgtttccttatctagctactatttacatgggtgtgttcaatttttgaaaaggcatcaaataatacatttataatctatgcacttttctatatataagtaatgtatcaattttttaagtattttaaagtatatattacttgccatattaagagaataaagggaaaactcatgactatctcaatagatgcagaaaaatcatgtaataatatttcctgagctgggtgtgggggctaatgcctgtaattccagtatttggggaggctgaggcagcaagattgcttgaggccaaaagtttgaaaccagcctgggcaacatagcaagaccctgtctctataaaaaaaaatccaaaaaaaactaataacatttgccatccatttcttaaaaatattacactaggatagaagagaacttccttactctgctaaagcacatctatccccccaacccccaaaaaagaaagcaaaaaaaacagcaaccaaaaaaaaatcattgttaataggaaaataggagcattccactgaaaatcaaggataatccaagagggccaagcacaatggttcatgcctgtaatcccaacactttgggaggctgaggtgagcagatcacttaaggtcagaagttcaagacatgcctggccaacatggcgaaacctcatctctactaaaaatacaaaagttaaggctgggtgtgatggctcacgcctgtaatcccagcactttgggaggccaaggtgggcggatcacttgaggtcaggagttcaagatcggcctggccaacatggtgaaaccccatctctactaaaaacacaaaaatcagccaggcatagtggcacacacctgtaatcccagctactcgggaggctgagacacaagaattgctagaacccagaaggcagaggctgcagtgagccaagaatgtgccactgtgctccagcctgggtgactgagtgagactccatctcaaataaaaaaaaaaataaacaaataaacagaaattagccaggtgtggtggcaggtgcctgtagtcccaggtactcaggaggctggggcatgggaattgcttgaacccagaaggcagaggttgcagcgagctgagatcacaccattgcactccagcctgggcaacagagagattgtctcaaaaaaaaaaaaaaaagaagaatccaaggggcagggcaggcacctgtaatctcagtactttgggaggccaaggcaggagaatcacttgaggacaagagttcaagaccagcctgggcaacataacaagataccagctgtacaaaatatattttttaaaaaagaataatccaaggatgcccagcattgtcaatattgtactgggatggcctagccaacacagatcagctgtcagtatttttttttttttttttgagatggaggctcgctccgttgcccaggctaaagtgcagtggcgcgatctctgctcattgtaagctccacctcccgggttcacgccattctcctgcctcaggctctggagtagctgggactacaggcgtccgccaccacgcccagctaatttttttgtatttttagtagagatggggtttcaccgtgttagccaggatggtctcaatctcctgaccttgtgatccacccgccttggcctcccaaagtgctgggattacaggcgtgagccaccgcgcctggccagtattttttttattattatttttagaaacagggccttgctctgtcacccatgctggaatgcactggcatgatcatagctcactgtagccttgaactcctaggctcatgtgattctctcacctcagcctcccaaatagctggaagtacaggcacacgccaccacactgagttaatttttatttttttacaggtgtaagccaccaccccgggccagctgttgttattaacaggttattattatctgcccagaaaaccccaaaaaaagcctacaaacaaattattagaagttataaaagagtctagaaagaagcctggctttaagatcaatatactatacaaaaatcaattgcgaccaggcatggtggctcacgcctgtaattctagcattctgggaagccgaagtgggtggattacctgagctcaggagtttgagaccagcctggccaacatggtgaaaccccatctctactaaaatacaaaaaattagccagacatggtggctcgtgcctgtagtcccagctactcggaaggctgaggcacaagaatcgtttgaacccggtaagcagaggttgcagtaagccgagatcacaccactgcactccagcctaggtgacagagtgagactctgtctaaaaaaaaaaaatcaatttcgcgtctatacgttagaaacaaacagaaaatataacttttaagagacaccatttataataacaataaatactacagattattttagactaaatataacaaaagatgtaccaaatcctaatacagaaaactttttaactttattgaaaaatattaacgaccttaaaaaattgagaggccaggcgcggtggctcatgcctgtaatcccagcactttgggaggccgaggtgggcggatcacctgaggtcgggagtttgagaccagcctgaccaacatggagaaaccctgtgtctactaaaaatacaaaattgctgggtgtggtggcgcatgcctgtaatcccaactactcgggaggctgaggtaggagaatcacatgaacccgggaggcgcaggttgcagtgagccgagaccgcaccattgcactccagcctgggcaacaagagcgaaactctgtctcaaaaaaaaaaaaaaaaaaaaaccataaggaatgaagacaaataatctaacaaagggttagtatataatatataaaatataaaagaaagcttacatatcaagaagaaaaagttaaccctatagaacaatacagcccccaccaaaatggtcattttacaaaagcagcacagtcaatgcacatatgaaaagaagctcaacctacttagtaaccaggaaaatacaaattcagaccctaatgagatatcatttcatacccaacagagtggcaaaaatttttaagtgtgaacagttgaagggcatgtatttcaacaaaaattctttaccctctcaccagtaatgtataactgctacaaccattttggaaaacaatttagcatttactcccaaagctgaacaaaccctacagccagcaattgtactcctgggtgtatacctatgagaaactcttacacatatgtacaagacatgtacaagaggacatgcataagaatattcatagcggcagtagccagagtatccaaaaactggggaagaaatccacacataattgacagagaatagatcaattgtacagatcctactgtacaatagcacagtaggatgtcatacaacagtgaaaatggaagaacaaagtcccacacgggaacgtgggtgaatgttagaaacataatgacgagttgtttaaaagcaagttccaagcctgggcaacatagcaagaccttgtctctactaaaaatttaaaaaattagtggagtgttgtggcacatgcatgtagtcccagctactcgggaggctgaaacgagaggatcacttgagcctgggaggtcaaggctgcagtgagccatgatcctgtcactaagttccagcctgggtgatacagcaagaccctgtctctaaaaataacaataataatataaaaagcaagttccagaaaactacatatgataccatttttacagagctcaaaaccaggcaaatctaaacaatatttattgtttaaaggtataatacatacatgacaaagtatataaaaatccaatccaagccaaactaaataaaatattgcttcctcatgggaggaggcaaaggagtggatggggaaaagaacacaggtaaaaagcaagttactcctgatgctccatttcttgggctaagtgatgagtccatggggtttgttaaatcacactccacatccaatatttttgttacatataatcctttgtatgtagcaaatatgtcctgtccctggtatcaggattaagccatccatttgtgacacctaggacaccatttcctttgacttgttaattccctttgaaggtcattgatgtcctcaaccaccttggctagtgggatgaagacaatctgtggaagtatgtcttggcccacccaggcctcagctcagccttctaaaactaatagcccagctggtcagatgttaggaagaggtgggcgaagcccactgataaaactcatctactaaaacctccctctatgacctaaagcctcttgtcgtaggctcgctggtctccacctagccctgttccacttgctgtgactattctggcttcccaaccaccccttccagaacctagattggtcatggaggtcacagaggtccatggtaaccgaaacctcgtgtcagtcccacttctgaggccaggtgcaggcacgtgtgcttcagaccccacttgctcaagctactaacaaaggtcagctccgtggccttgaggagttaagcctgtgtcctcgcctgtaaaatgcaaatacagaagtgatgacatctatttaataaggttgtagtaaggatgaacgaggtaatgcacagaaaatgcctaacccacagtaaaggtaccctacgtcactgcctctaaacctcacaagatagtgggagagaattaaactgagctcccacacataaatggcctgacacagcgactctccattccctacttcccacccctaaacacacaaactctgtctcacacacacacacacacactcattcactcaacttaaaaaggcatgaagttgcagggtgagtgtatctgctgcccccttatggccagagaaaagaatcacactgttctcctttcctaggaacccagaaccaaaactccgggtgaaaaacaaccaccccagccctgctctttcctctctcccctatttgccaacttaccaaaaaaaaaaaaaaaaaaaaaaaaaaaaaaaaaaaaaaaacaactactgagcagataaaataatctcaagtctccaaatctctcaatgaaattgcctcagcagggacagaaatctgcaggggaggtaagggagatgctactttgagcaggtttcacctcctagagctagtttcttctttgcaaaatagagacaaaagctgcctcactgaggtcttgtgaggattaaatgatatcctgtatgtaaaacactagcacagatactagcacagtgtctggcacacatagtagatactcagtaagtaatcccagataataatcaccctggtggtcaaacacagtcgctcccatgtaaaatcccagctactggggaagctgaggcaggaggatcacttgaggccaaagattcgagaccagaccgggcaacatagtgagacagacccccatgtcaaaaaaaggaaaaaaaaaaaaaagaattggcctgaggaggctcttctctaactcataagacccttccttttaaagaggaggaaactgaggcccataaaaagggagagatttggccagggtctcggaaatcagaccctgattagtagctgaacccaggctggagctcaagcctccagaggaaggggaaggagaaaaggaatatttcagctcccccagttgctgggcaggacactgtcactttgccaggctcctcttcctgggtccccacctccctggacatgcttggccttcctcacaccttcctcacccctgctctctcatggaccacaggacaatgcagaaagggaactctgctattttatttgttatgtgaaagagtctgggtgcttgtcgggtgcagctagatggtcagtccctgaaggcaaacaggaggcctaagacgacaccccaagcaggatcttgcctggaggatgctgcaccaacaatctgagacttctctaagatgttgaggacctcagtcactttgatgctcccaatatgatgaaaatctgctaaaagctggttatgttcacgagcacaccccatgaggaggaaggtggtattgagaaaccctgtaaggaagagagggagaagtcaggaacactttcaagactcaagagccctgccttcagccaggtgcagtggctcacacctgtaatcccagcactttgggaggccgaggcaggtggatcacttgaggacttaaggccaggagtttgagactagcctggccaacatggcaaaaacccatctcccttaaaaatacaaaaattagccaggtatggtggcacatgcctataatcccagctacttaggaggctagggtatgagaatcacttgaacctgggaggcagaggttgcagtgagccgagatcggaccactgcactccagcctgggcaacagagcaagactcccatttcaaaaaaaaaaaaaaggcccctgccttctccccagaggcccctcacaaaccagaacacctgctctcccatgagagacttaggcaccaggcgccttccccttcctccttggaattcatgtgccctgtcccttgcaaccccaatcccatctctggatcccaccagcctctctgagatgtgaaggtgctggacaatgcctggcagagagtaggcatttgataaacaatattcctctcctctcacctgcctgaaattttaaggtggaactgtaacacgtagaagcagccaaggggcaagaattagtggtgacaaaatttgggaggcaatccttcatgtgctcgcccacacaggtcgggcagctacaggacgcagatgtgatagacttaggagtgctggccttgagtttcacaaaaggctccaaattggtgaggttgttgcagagataagaccggcagacgcgactgtaggaggcaatggacactccgggtggggaaacaaggtaggagatttgcgcagggtaagacgaagacgagctgcagcctttaaagcccacgactccccttgcagtccctgaggagcagaggattgagagagctcagatcagtgtcactggcctcacccagagtcctccctccccccagctctttctgcacccaccctgcctgtcacaatctgtgcctccctccccaacccctgtgtccactcagtgcagctgcacagggctcagatgctggggtctccatctggatctcctcattcttccactgcaggacctcccccagcccccactcctctctcccttgtgccctcctccagggatctgtccacctccattctacccacttacccagcccacaacacaaccagtggggccctgcccctctcctgccagtgtcctgacattatccagatataaatgatggccaggcacagtggcttatgcctgtaatccggacactttgggaggccaaggtgggcagatcgcttgagctcaggagtttgagaccagcctgggcaacatagtaagaactccccatctcaaaaaaaattaaaaaaaatatatatacatatatatatatatgtatagtaactatgtggaattctaatctacagtccctcggtgctgggagtggagctgggggtcagaagagcaagcaaaacgaaattgatcaaacttagactgcttcacctgtctcaatgaacactagcgtctcctcgcagccctcttgcagcttacacaccatgttcctcatcagaagccacttccagttatggaaagcaacagctctgaatcttgaggctgttgcttcatagcacaaaagagctccagcccctaaaaagagaatgctctcccagtcattggcccctcatatcatcttctgagcccgttaactgccaaccaagagttcagcccccacaggtcctgtccccagcgaaacctagatacccagccctcgttccaccagtgacatgaatccagcctcccacctttctgggtcttatagcatccagccccacaggacatacgaggcagagtggagatggcccctagaaggcagaacagctgcacaagtctcaaatgctggggtcccatggccctgtgtctgggtcctgggtgctagaggtcagtctggaatcagtttcagtctggatcccaagctcagttcccatcagtccccgaattctttgtccacctgtctctgggtcactgtttctggagcagaaagttgattgcatcagcttctaggacataggctccctcagaccttctgggtcacaggtcttcccatctccactgtctgccctccagtctaacctgcaccatccaccatcttagcttctcaaagcaggactctcactctcccacttaggtcctcccattggacaaggtgctgagcagagaatcctggcttactgatatgcaggctgttctccagccagaggcaatgagatcagagaaacaaatagatgtttcaaactcgtgtgtgttgtgtgtgtgtgtgtgtgtgtgtgtaagttaacatatcactaaataacccttggttcaacatggaaatttaaaagtatttagaactgaggtcaggagcagtggctcacgcctgtaatcccatcactttgggaggctaaggcaggtggatcaccagaggtcaggagtccaagaccagcctgccaaaatggtaaaaccccatctctactaaaaaatataaattagccaggggtggtggcacgagcctatagtcccagctactcaggaggctgaagcatgagaatcgcttgaacccaggaggcggaggttgcagtgaaccgagatcgcgccactgcactccaggctgggcaacagagacagagactccatttcaaaaaaaaaaaaagtatttagaactgaataataataaacatattacataacacacacattcacacacagacatagacacagacagacacacacatacacacacacacacacacataagtgcatgtaaaatctgctgtaaactgaataaggtctgaagtctaggtaagagtactgtacaccagcccaggcatcacgacaaaatgccatctctacaaaaaatacaaaaattggccaggcatggtggcatgcacctgtggtcccagctacttgggaggctgaggtgggaggaccacttgagccccggggatggaggttgcagtgagctatgactgtacaaacagtattgtacaaatgtcaatttcctgctcatatactatggttatataagatgcccctacagggaaactggaggaaggatccaagggactctatgtaccacttttgcaacttcctgtgagccaacaatcatttcaaaattaaagggtttttaaaatatatacagccgggcacagtatctcccgcctgtaatcccagcactttgggaggccgaggcaggcagatcacgaggtcaggagatcaagaccatcctggctaacacggtgaaaccccatctctaaaaacacaaaaaaattagccaggcatggtcgtggacgcctgtagtcccaactacttgggaggctgaggcaggagaatggtgtgaacccgggaggcggagcttgcagtgagccaagattgcgacgctgcactccagcctggacgacagagcgaaactccgtctcaaaaaaaaaaaaaataaaataaaatatatacatcaaaatttgagacacagctaaagcagtatttagaagtaaatttatacttttaaatacatgtatcaggaaatgtgaagcattaaaaaataaatatattcatgaactagttcaagaaattgtataaggagcaacaaagcaattctctcctacccaaaaaagaatggaaataaggatgatagcagaaatcaatgaaatagtaaacaacaacaaacattattacaaaaaagatccattctatgaaaagatttagttagttcgctggcaaatctgatcaagggagaagatgcaggccggcacagtggctcatgcctctaatcccagtgctttgggaggctgagccaggaggatcccttgaggtcaggagttcaagaccagcctgggcaacacagtggcttatgccggtaattccagtgctttgggaggctgagccaggactgctcgaggtcagcaatttgagaccagcctgggcaacaccttgtctataccaaaaaaaaaaaaaagtttaaaaattagccaagcatgggagtgcctgtagtcccagctactcaggaggctaatgttgaaggattgctttagcctcaaatcacaaggtcaggagttcgcgaccagcctggccaacaaggtgaaacactgtctctactacaaatacaaaaattagcccggtgtggtggtacgtgcctgcagtcccagctactagggaggctgaggagggaggatcacttgaacccggaagccagaggttgcagtgagccgagatcatgccactgcactccagcctgggcaatagaacaagaccctgtctcaaaaaaaaaaaaaaaaaaaaagtgaagaaatgcacaaacccagcaataaccaaggaaatgcaatctgtcaaattgtacatctatcagactggtaaggatcagaaagctgggaaaagacaagtgttggcaggtatgtggggataaaggaacccttggcccctgatgctcatggcattatttggagggctggggaataaaacactatttctggactctgagaaacaaaggagttgagagttctgaccaggatctcaggcccaaagcagcattgcaggggtctgacactacatggtcaaattgggtttataaatacccatttccagtataccctacataggtattacaaaaatgtccaccttcatctacaaaggaacatgcacaataatgcagcattttttttttctgagactgggtctcgctctgttgcccaggctggaggacagctgtgctcactgcagcccccacctgccaggctcatgcaatcctctcacctcggccacccaaatagctgggactacaggtgtgcgccaacacacccagctttgtagagatggagtttttccatgttgccccagctgttatcaaactcctgggctcaagcaatccacccacctcggcctcccaaagtgctgggattacaggcatgagctcccatgcccagagaatgcagcattattgtggtgatggtaggttgagacaatgggagcttccctctctgagaccaagtgaatgcaaaacatgctggggatgtacgctatggaatatcacgcaggagttggaagaagttgattagatgtacacaggatgtgaggcagggtacagtggctcacgcctgtaatcccagcacttcgggaggctgaggtgggcggatcacctgaggtcaggagttcaagaccaagctggtcaacatggcaaaatcctgactctactaaaaatacaaaaattagtcgagtgtggtggtgggagcctgtaatcccagctactcaagaggctgtggcagcagaagaattgcttgaacccaggaggtggagggtgcagtaagccaagatcacaccattgcactccagcctgggcaataagagtgaaactccgtctaaacaaaaaaaaaaaaaaaaaaaaaaaaaaaaaaaagtacacatcatgacagaatgacagaatgtgtacatggatagattgtaaaatcacagtgctgattattacaaatagtatataacataatatcacttgcataaattaaaaactcaaacagaggtcgggtgtggtcgttcatgcctgtgatcccagcactttgggaggccaaggcagacagatcacttcaggccaggagttctggaccagcctggttaatatggcaaaaccccatcgctaaaaaaaaaaaaaaaaaaaaaaaaaaaaaaaaaaaaaaaaaaaaaccccaacaacaacactacacacatcctgggagaacacacacacaaaccaaaagatacatattaaccaccttagaatgagaattgcctataagaaggttagggaatgaaagtggggaattggtggaaaataacagtgtaggagggggtacaaagatcactgaccttggcctcagagacccaggttggaatctttaccccttcatttactagctgtccaatttgttgaactcagagcctactaccttctttataaaatgaagtataatacatctcatagggtcattgtgaagatcaataaaattattaccataagtattaggcaaatgctaagctctttataatcgttggttaccctgttcctctaccactatccctccctcccacacacacttcctctcactctctctccactacctaaaggatcaagttcaacctctttagctggcctttaagcctcccccgaccacaccccaccccaccccagataagcgccacccaacctttccaattttatctaggacagctcccctgcccagcagtccagctagaggtcacgtcggccacccttttctgcctgcaatgcctcagacacacatgctctgtaacccagaaatctgtggccaagaaaggtgccaagacccgcagaaaagctgggacacaggaaagagaaacgaaggctgacaacagatctcacgggggtgagggagattaggccaatcagagaagacagcacacgccagcctcagatgcagaacaactggacctggacctaacaagctgagtacaagtggagacgcaaccagaaaagattgaagtgaaatcctcaagcaaaaaaaaaaaaaaaaaaaaaaaaaaaaaggatggagcagtagtcagaggggatgccacccctacaaaagacaaacaaattgatggaatggaaccttgcagggagagagaggaccagcagagagagggaggcgtaggaaaatgaggagtggggcacaaaggtggggctctcagggagaagaggagtcgattttagagggggagaagaaaaggacacagagctggctgtacagagaaaaggggccaaggcagagaagatggcgggatggtgtgagacggagttcacagaaatacccagagaaggcgacgattacacagaggagcccccagaggggcgaactcttgaggaagatgaacgcggagggtggagccagccagaaattcagaaaaactagaggcgtccccggtagcgaaggaagccgggaaggggccaggctatcagggcatgaagcacgggagaaaatgggtccgaagagggagagcgtccgagagaaaaggaaaatcagagattaggaaaatcacaaccgacacaaagacaagaagagacacaaggaaaggggtgcaatctgaggaaggagggcccggtaagcaacccggtaatcacagcgctgggagagaacgcataaaagaagggtagctcaggagttgtggggcaccggaagagacataacagaaaacgcaggcctccactcagcaaaaacaagccacgcgcgaagtcgaggtacaaggcaagggaaggccagaaacgaggcaacccgtgcacagaccgggcttggtcaacgccccaggggcggggccaggcgggccgttcctggggggcggggccagcctcggtccaataaggggtactcgacgccccattggccacctgcctcgaaagggggaagacagtctgggcgggcaggacgtgcggagggagaggcagcggtggcgcgaggctcaactcgaagcgctattggtgggactgatagtcttgtgcgccaagaagctggcagaagggaaggggcgggacatcagttcaggatctcaaaccgcattggtcgtctgcctcggctgagagaggcgatgcttgaagttcattggtctttgtgagacagggtaagaaaagcagcgcgagcttggcggttcctctggccactttctcacagtgtctttgggcgtcttcttgactgaatctgactccattggaggctgtggtaaccgtgaactagctgcacgaacacggtccctcctgcctttccgtcctcctccctcttagccggactccctaacccaggcatcccctctcctccccctcgcgcccctcccgccctcgcgccccctctccccttccctgcctcgcgggccccttggcgcgttcccggttccccactcgctccctggggcacgggaaggggggagggggacatgcatgaaattaattgttggtagtggccacaggagcaggaagcgctggacacagtgacttcacatgtttacacaaaaacctgaataaggtgtgagcgcaagagagacattagtgccccaaggagaaggtttttggcccagatcagggcctagcacatgacaggggctcagtaaccatttgtggaatgaatgaaggagtgaaggaaaataacttgaaagtggggcaggtggcgggtgcggtggctcatgcctgtaatcccaacactttgggaggccgaagcaggcaggtcgcttgaggcaggtcaggagttcaagaccagcctggccaacatggtgaaaccccatctctactaaaaatacaaaaattagacgggcgtggtggcacaggcctgtaatcccaggtactcgggaggctgaggcaggagaattgcttgaacccaggaggcggaggttgcagtgagccgggattgcactactgcactacagcctgggctacagagtgagactccatctcaaaacaaaaaaaaagaaagaaagaaagtgggacaggggagccaagcatagtggctccagcctgtagtcccagctactggggaggctgcggcaggaggattgcttgagctcaggaggtggaggctgcagtgagccatgatcacgccactgcgctccagcctgggcaacagagcgagaccctgtcaataaaaaaaaaaagaaagtggagcagggaatccatgagaataaggtaattattgggggtgcaagagagggttctgatttaaaggggtacaagaacaaaataagactaaaggaatgcaaggaggcagttgctttgcagggcatagatgagactaagaattgaaattgaactaagaattgaaaggggcataaaactactggtaggcattggatgaatgcatgagagtggggtgagcattgttgaagaggatgccaggaaacactgttgggacggaacagggtgcttgtgaaaaggggatgtaggactcgctgaaggggtatgtgaggacatgagtaggttggaacctaggatgtgtgtgtgggtgggaaagtgtttggattgaaagaaaagaatgtttgaattgaaagaatacagaatgtcgggcgcagcagctcatgcctctgatcctagcactgtgggaggccaaggcaggaggatcgcttgagcccaggagttcgagaccagaccagcctgggaaacataatgagaccttgtctctataaaaataaaaaacaattaaaaaaaaattttttttttgagacagagtcttgctccgtcacccaggctaaagtgcagtggcgcgatcatggctcactgccagctctgcctcccgggttcacgccattctcctgcctcagcctctggagtagctgggactacaggcacccgccaccacgcccagctaattttttgtatttttagtagagacagggtttcactgtgttagccaggatggtctcgatctcctgaccttgtgatccacccgccttggcctcccaaagtgctgggattataggcttgagccaccgcacccggcctaaaaatttttaaattaaaaaaaggggggacgggtgcagtggctcatggctgtaattccagcactttgggaggccgagacaggcagatcacttgaggccaggagttcgagaccagcctggccaacatggtgaaacaccatctctactaaacatacaaaaataaaaaaaaatagccgggcatggtggctcttgcctgtaatcccagctactcaggaggctgaggcaggagaatcgcttgaacccgggaggtggaggttgcagcaagccaagatcgtgccactgcactccagcctgggagacagagtgagactccatctcaaaaaaaaaaaaaaaaaaaaagaaagaacacagaagaggaagaggagaggggtttctgaagaaggaagatacctgagaaatgtcatggggtaaagaggggagaaagctgggaaagaagccagaatcagggcggggtctaaagaggggcaggatggagacctgcaggtgtggtctccagggcaggagggttgttaggggcaggcccacctggctatgcttaccttccactcctgcccctagatccatggaacccagtgacatgcctgctggctaccactgccccttagactctgccccctgggatgagaccagagacccccagagcacagagctgatccccaggagagccatcagccgctctccaacctgcgcccgctgccgcaaccatggtgtcaccgcccatctcaagggccacaagcgcctctgcctcttccaggcttgcgagtgtcacaaatgtgtcctcatcctgtgagtatgaggtctgggaggggaggaggatgagcctcctccaaagggtggctgacctttgacttgcaactccccacttttagggagcgccgcagggtcatggctgcccaggtggccttgcgtaggcagcaggaggcgcagctaaagaagcacctgatgaggagaggggaagcctctcccaaagctcccaaccacttcagaaagggaaccactcagccacaggtcccctgtgagtgtctctgaccagcgatggggcaggagtttgggtacaggaggcaggtatgggaaaaagaggcccagtcctgctgctgaattggtgtacgaccttgaactaagggtttctactccctcggcctcagctgtcccagcgttgagagaatgcagcgagttctgtgggtcaaaaatgggctagaggccgggcacagtggctcacgcctgtaatccgagcactttgggaggctgaggcaggcagaccacgaggtcaagagatcgagaccatcctggccaacatggtgaaaccccgtctctactaaaaatacaaaaattagctgggcttggtggcgcatgcctgtagtcccagctactcgggaagctgaggcaggagaatcacttgaacccaggaggcggaggttgtagtgagccaagatcacgccactgcactccagcctgggcgacacagcaagactccatctcaaaaaaaaaaaatgagctagatgggggagatgagaactgtctggggttggggtaggataggggtcaggagaaagggctcattagagctctccctggtccttcacagctggaaaggagaacatagcaccccagcctcagaccccccatggggcagtcctgctggcaccgacaccccccgggaaggtaaggagaggctggggcctgagaaagtgtcccccaccctagttcctacccagaccctttcttctgtgccctcaacacctgggttctagccccagccctggtttgctatgtaatctagtcaaatcactgctcttctctaggcaaaatgaggggaaaacgagggcctcccagccccaaagttttggggttctgcccgtatcccagaatacactcaatccttttccagccttgtacccaactccagcctgtgccctctgcccctgcagaactcctgtgggcctctgctgctcagccatcccccggaagcctcgcccttgtcctggactccggtgcctcctggcccttgggtccctggacactggctgcctccaggcttctccatgccaccaccagtggtgtgccgcctgctgtaccaagaacctgctgtctctctgcctcccttccctggtaagatgataattcaacattcattcaacatatatttgagtgccaatctgccacatattggagagggaagaggaagaaagcataggtggggagagggaggaaagaaactatgaccttggcccctatacactctgcattcttttattcttattaggctttgaccctggcacctccctccagctgcccactcatgggcccttcaccacctgcccaggatctcacccagtactgacagctcctctttctggagagccccaagggccccctagccagccccgcacgtgagtagggagagaaggatgtgtatcataagcctaagcctgtgctgtgtccaaccacagtgctggtgtccaaccacagtggataatgaagatgaaaaggtctctgactaataggcaaggcagagctctcctagtactgccatttcctagctgtgatgctttggacaattatctttacctctctgagcctgtttttctatcagtaaattggagacactattacttacctctctgattgttgtaagaattagcaataatgtatggaatagacctagcacagactctttaatggtagctgttatatctgcttagacagatttgatggggtaagattgcctgctgatatggggggcagagatgatgagagcctcagagacccaggagaggggccagaggccattaggaaaagcttcccaaaggtgagccaagctctccttcaagttctatggtgactggggaactgggggaatgggacccagactctgataggtcagggacagtaatctcagtcttctaggtgtttttttaaaaaccggcatcaggtggggcctggtggctcacacctgtaatcccaacactttgggaggctgaggtgggaggattacttgaggccaagagtttgagaccacctgagtaactgagcgagacttcgtctctacaaaaaaattaaaacagccaggaatggtggtgcacacctgttttcctggctacttaggaggctgaggtgggaagatggtgtaggcccaggagttcaagcttatggtgagccatgatcacaccgccactgcactccagcctaggtgacagagcaagagcctgtctcaaaaaaaaaaaagacactagtgatttcccataatcctcacagtagccctgggaggaaaaactggcaaggatttttactttactgaaaacaaaataagtcaagacacagcttaatggcccagcaggctctcagattcccagatcaaaacatggcaaaatcctgcccctctttcaatgtgtgcatgtctgttcatctgtttaaccaccctggcatcttctctccttgtttctagacactcaactctgatactccagccctgtggcaccccagaccctcttcagctacagccacaggtcctgggaaagaagtgggatctagggccctgggaggaggttgagcctggggaaggaaaaagcaggaaactgaaggaagcaggggctgaggaacacttagagggtgggcagaagcgggggttcccagtctgcttgtctccctttcccttgcaggcctctggagcctcgtgcctggcccggacatctggcccctcagagtggcagctgcagcaagaggcagctgaagccctcgtggggctgaaagattcatcccaggctcctcgtgtgaccccttctgtgccccccaaccctgcctggatctccctgcttcacccctgtggcccaccaggtgggccatgaaaggagaggatggatagggatggctgggaaatggagatcactgaagtacacagggactaaccaaggagatgagggggtcgacaggttgaacgtcttcaggcccaggaccccaagctcctcagcctggcccctgggattgcagttgagagttattcagtgaatcctttttatcagtttggcactcgacagcaaatttcttgatatcaaggaaagtggggcactgagaaaggcagggacttgcccaagggcatatagtgagacagtggcagggaacccaatgctctgtctctggacccaggctgcctgctgaagtctgaagtggggtctggcctgggaggaggtctgataagtgccttcaaggagcttacgttctagttagggaaattggatgccttcacaaggctcagtgacaaacctgaagaagattggaggaaccttgaagagtgagaaacacctagggggacagacagggaaagctgcgaattctcttgtccaaatagtggattgggcagactggcctggaggaaatgctagaacagagggaaaggaggctggagaggcttctgatggtggagatctggcatgccaggcttaggtgtctagaacagcaactgtatgtgaaggggagccagggaacgtttctgaactaagcaaggacaaattcagagaccctgagctttagaaagacaagtgggtggctttgatggacggtttggaggaggcaagactggaggtgggaaaattagcaaggaggtctgtgaaataatccaggagaacaatgatgaggcctggattggattcggtaaaaagagggggttgctagaaggaaaaacaggtgtgacctgatcctgccccttccttcttgcctgtagctcctgctggaggaagaggattccagcctgttggcccctgtcttcgacccagcccagccccctctgttgctctgcatattggccgtctggggtccatctccctcctgagctagaaacccagagatggaggctgtcttgctatggcagggaggtgacagcctgctggcactgtatatttagtgtcttacttaaggatttatgcatggaatttaatgtagtacaagcttcgggcttttttgtttgtttgtttgtttgtttgtttaagctttcaggtgcttcattagctttcagttcctttggtagtgtgggcatttccttggctgacagtggatattcttgtacccttcttgggtcctgggatctcttgaaatccccaataaagagagagttgtgctatttaagctgaccagtatctataaacgtgtttgcatgagtttacatcccaggattccatgattctgtaaatgcctatgcattcatgtctgtctccatgcatgtgaaaacaggagagtgttttcattttgtgtctaggtttgtgtgagtaagcaagaaataaacctttgttgttgtaagccactgagatttggagagtgttaccacagcctaacctagtctatcctgactgacagaaaggacttgttcatttcgcttctcaaagtgaaaaatctgttatccaatagctaccatagatgaaaacaaacttggatttttttctttgtccaaataaaaaaaaatgatgtaaagaaataatgggggattcactgattaattgcccgctctgtgccaggcatagacagtttccagctgtctagaggggctacaaatcgaaatgcctacagggctgagcagatcaaataaatgagtaaagaaggccagatggaccctggcaaactgagaatggatgccttgcctaaggagcagcctccttttggccctagcagattactgccaggcgggaatgtggactcagtgttgctccatcttctgattttttaagagaaactggaaaactagatttccatgtaaaacatcttaattttcaaatgttggctcagttttcttctttaaattctatacgtgccaaataaaacatattttcaggctagctttggccagtggaataccaatttgatacattttccagatggggaaattgaggctaaccagaatagaaagaatcgagttagtctttatcacaagtttttcctcaactagggaggttcacgtgtctgagtttcgaaggatccataaaaggttaagaaacatttattaccatttattgagtgcccactccatttgattcacatatcttcacagcaaccctggaagttatgcaggatggttcccattttacaagtgaagaaacaagcttaaagaggtaaagtaacttgcccaagtgttttaggggaaatttctaggcagagatcagaggagggttccttctctttgccaggctccaaattagttaataatgtttataaagcattgggccgggtgtgatagctcacacctgtaatcccagcactttgggaggccaaggcaggaggatcgcttgagcccaggagtttgagaccagcctgagtaacacggggagaccctgtctctataaaaacaaataaataaaagcatagaatgaaagatgcaccactcctttccccaatcaggactccagaagatacatacaagtcaagagtttttcaaaaaagtcttttatttttctcctcaagatatcattaagaataagatcttacctgcatttgtttctcagtcctctggtgtcaagtccttctccttgaaccattccgtacataggaaaacctgttgagctattccaaagacatgaagcctggagacccccttcccattcccacccttagaaggggctcaagggatgtgcttgatcactgattctttttcctgatgttacctacaccccttgttttactcaagatgattgatggtgatgacatccaattacaacttgttatttcttatttgggattttgagagggtgggtttcttctcctccctagcagagtacagagtaacaaacctgcagcacttctcaggagatactgagatatcaggagaccaaagtcggcttcacacccttcttccctccccttagctataacttagatatatgattgctccttaatagacctgcctaagacttggtgtgccatgctttcctagtgacagatgaccagggccacaaagtcacagagaaaggaagcactgcaacatgcaacatggctgagattctgctactcagcactgaccaagggtcctctgtacaccaaggtcacagagctgagaagggtaaaagagaaagtataatttggggttaaaggatggcatgaaaaggggaggaaaagaggaagtgatggagattgggggaaggagtagactagaggccacctctccttcacctctcctccagtacccggccttcagtacccagcctgggcaaggcttttcacaccagttggccaggccaactttgtctttcaaatcgttagggccccccattagtgcctgagggaaagggccagagcttctgcagatgtcagtcttagggaaaagagcagatttaagagttgctcatgctcctaagttgttgcctgttcaggtgcagcactcttcacctgtggttgtagggagccagtaggctcctggcctcttcttggctctgagagattacagataatagactgtgagcactgtttcctatactgccccctttcccacttcccagtgccaggtagggaaaggtattgccatggtccaataaagtactgagtaaatcatctcccttctaaaccttctttgtgtaccctcttggcactctgcagacttaaccaatgaggtcccaactatgaagcaccgtccctgttcctctctctcctcacaagactcctccccacagtcacccaggttttatttcaggagcttatttcacattctgccctttgggaatccatgctcctttcgcttcagccctacattaacttgctccactcctgacctcaattctcgtccaacgtagaactgacatcatacacttatcccatccagcctatacgcagaccctcattgcttcgtccacataggcctcattctgcacccctgttccattgtgtagctggctttgcagccctgacacgtttgcataaatacagtcctataacccctaccctgcatgggccttcacaagatcctgaactcttcacaaaaccaaagttcatccttttcatccaactcaaaataatatgttaagcctctcaggcagagttccctatgttcccaaggggccactggtctctacttcatagtcctgatcaccctgagctgtgcctatctatgtccatctatgtctccccctcagagaataagcactctcagagcacaggacttgcctgcagctcctccttgggagctcagaataaatgactgagtaaaatacgttctgtctgattccttaggaattgttttttcctactgagttaacacactccaatgctgcccctctcctcatcaaaatgtgaactttctgacctcaaaccattttttctaagacagcctctgtcacccaagctggagtacagtggcacagtcatggctcacggcagcctcaacctcccaggctcaagtgaccctccagcctcagcctcctgagtagctgggactacaggcatacacctccatgtgagactaatttttattttttgtagagacagtgtctcactatgttgcccaggctggtcttgaatgtctgagctcaaccgatcctcctgtctcagcctcccaaagtgctgggattagagttgttttgtttgtatgtgtgtatttttgtttcttattattttgggattagagttgtgagccaccgtacccagcaaaaaaaccttcaggggccagatacagtggctcacacctctgatctcggaactttgggaggccaaggtgggaggattgcttgagctcaggagttcgggaccagcctgggcaacatggcaaaaccccctttctgcaaaaaatacaaaatttagccaggcatggtggcgtgcacctgtagtcccagctactcaggaggctgaggtgggagaatagcttgagcccaggaggtcaaggctgcagtgagccatgattacaccactgcactccagcctgggtgacagagcaagactgtctcatatatatgtgtgtgtgtatatacatgcaacacacatatatacacacatatacatatacatatgtatgtatatatatatatattatatatgttcatagcaaaatttagtggaaagtacagaattcccatagtccccttgccaacacacagggatggcctcccttttgtatcaacattccacaccagagtggtacctttgctacaatcaaggaacaccgtattatcacccaaagtctgcagtttacatcagtgttcactcttgttgtatgttctgcaagttttggcaaatgtgtaatgacacgtatccaccattacagtttcatagagaatagtttcattgccctaaacaacacccattcatccctccatccctccaagccgacaaccaattatcattttatcattttattgtcatcacaattttgcctttttccagaatgtcatatagttggaatcatacatttggattggcttctttcagttagtaaggcatttaaggttccaccatatctttcttttggcggggtggaggggagggggaggcagacagggtcctgctgcggagtgcagtggtgctggaacgcagtgcacttggctcactgcaacctccgcctcccaggttcaagcgattctcatgcctcatcttcctgagtagctgggattacaggcgtgcaccaccacacctagctaatttttgtatttttttagtagagacgggatttcgtttttttgttttgtttttgttttgagacggagtctcgctctgtctcccaggctagagtgcagtggcgcaatctcggctcactgcaaactccgcctcccgggttcaggccattctcctgcctcagcctcccgagtagctgggactacaggcgcccaccacctcccccagctaatgttttgtatttttagtagagacggggtttcaccatgttagccaggatggtctccatctcctgacctcgtgatccgcccgcctcggcctcccaaagtgctgggattacaggcgtgagccaccgcgcccggcctaattttttgtattttagtagagagggggtttcaccgtgttgcccaggctggtcaagaacttctaaactcaggcaatctgcccatctcagcctcccaaagtgctgggattacaggcatgagccaccgctcccggccagctcatttctttttagggctgaataatatcccactgtttgtaggtactacagcctcaacccatttttaaaactgtgtttaaagagtttattgaggccgggtgcggtggctcacgcctgtaatcccagcactccagtgccactgcactccagagcaggaccctgtctgcctccccctcccctccaccccgccaaaagaaagatacgggggaaccttaaatgccttactaactgaaagaagccaatccaaatgtatgattccaactatatgacattctggaaaaaggcaaaattgtgatgacaataaaatgataaaatgataattggttgtcggcttggagggatggagggataaatgggtgttgtttagggcaatgaagctattctctatgaaactgtaatggtggatacgtgtcattacacatttgccaaaacttgcagaacatacaacaagagtgaacactgatgtaaactgcggactttgggtgataatattgtgttccttgattgtagcaaaggtaccactctggtgtggaatgttgatagaaagggaggccatccctgtgtgtcagcatggggactatgggaattctgtacttatacactaaatttacaggcatgagcctgtaatcccagcactctgggagaccaaggcgggtggatcacaaggtcaggagatcaagaccatcctggctaacacgatgaaaccccgtctctactaaaaatacaaaaaattacccaggcgtggtggcgggaaactgtagtaccagctactcgacaggctgaggtaggagaatggtgtgaacccgggaggtggagcttgcatgagcagagatcacaccactgcactccagcctgggcgacagagcgagactccgtctcaaaaaaaaaaaaagtttattgcaaaagcttgagtatcttcagttgtggcttcaaatccgggctcaggctttaaccttatgtgaccctggacaaatgacttgactctaaggctcagttgactggtctataaccacctcacagagttgtcaattatgaacctgtaaaaactaacatgtacaaaaattaacaccagggacacagtgctgagaaactgtgttctctaaaatcacagactgccagaatttttaaaaatctttaaaatcataacaatagtgaaaatgggacatctcattcttacctggaaagtctaagtcactttgacacagagaagcagtcatgatctcagagaagcggtttttagagacaacattgtacatttatctaaactttctaatgtccaaggaagcagaatcctgggtctgctcctcgcccaggcatgatgttagctccgttgcataaatacatgcctgctttgccttatgtccatcaaaactctgctttatataaattttacctaagcttcactcttcccaaaatcctatattcaccctgtctcttcctttggtcaggcactccagagttcctctggagagctttaaaaaaaaaaattaaattcaatgaaatgacttaaatgaattaagtgtaaatgattcagaactggtattagaaattattaaaagtgggggccaggcacggtggctcacacctgtaatcccagcattttgggaggccaacgcaggtggatcacctgaggtcaggagttcgagaccagcctggccaacgtggtgaaaacccgtctctataaaaatacaaaaattagccaggtgtggtggcaggcacctgtaatcccagctacctgggagcctgaggccggagaatcgcttgaacccgggaggtggaggttgcagtgaaccaagatcacatcattgcactcccgcctgggcgacaaagcgagactccaactcaaaaaaaattaaataataattacttaaattataaaaagtgaatataaattacccaagtacctggagatttccagttagacatgcatatattacccactttgaatacatatggaaatatgtatgtgttggttctggaaaaacaattgagataatgaaaatattttctcaagttttagaaacagtatgagataggtttcaacaacattctacatgaatgtaaaaccttgatttaaatatatgatcttatgctagaagcatggttggttttaatttttctaacagatacgagtcttggcttattaataattaacacattttgcagccacagtatcagtgtggggtaaaattctaatatttgctcttatgttttaaattctcagtctttccaacataagaaaatagctacacacatttcagtgtttcctttttgcaacaagttaacataattttattggaccacgttatttagttgttgggccttgtaaggattaaatgagatcatgcatgtaacactacagtaacagccacatgataaatgtccaaataatatttacctgtgcctggcacagagcaggcactcaaaaaatattttttagagcatgtgacgcgccatgaaccagaggagccactttaaatggacaaacggggatctcattttttttttttttttttaatggtgagacaagccctgagaaggcaaatggactgcctaaagctacacaggtcagcggggcaggtaaatctaaattggcaaagtaagggctgagcgaacagactccgacactagaaggcagagctgaactaacttctgctaaggtcccgcctctgccgctttgtcccgcccttatcttctcccctcctccagcgcctcattcccttttcgctcgccccggccgtgctgaagcaacttccgccctgagaagggtggggcttccgtctcccgctctcgcgactcctggcggtgaaggacggaagatgatagccacatttcttcctcgcccttcccctaggttccctgtcacagttccgcccttactactcccacttccggccagggaacagccacttccacccggaaaaggggttgttccgccgtggggcgccagctgtggcccacccatcctgccccgtactttcgccatcatagtattctccaccactgttccttccagccacgaacgacgcaaacgaagccaagttcccccagctccgaacaggagctctctatcctctctctattacactccgggagaaggaaacgcgggaggaaacccaggcctccacgcgcgaccccttggccctcccctttacctctccacccctcactagacaccctcccctctaggcggggacgaactttcgccctgagagaggcggagcctcagcgtctaccctcgctctcgcgagctttcggaactctcgcgagaccctacgcccgacttgtgcgcccgggaaaccccgtcgttccctttcccctggctggcagcgcggaggccgcacggtaagcgggggctccgagctggaccgggcgcgaggcggcagggccggacgccgaagcctcagagcgcgtgcctgagggccccgaggcgcccggcgcgggcccgtcccgccccctagagccgcggccacgtgcgagcggcaggcccggacatgcccggtcagcgccgtccgggaaccgagcgtgggccccggggggcagcggcggggtgcgtggggcgtccggagtcccggggctggggagtggggtcgcgcaggatcctcacacgcaggggccgggctctgttagtgcgatccagagaggccgtgggcgtcggtgagctccttcagacccgcaggagccggagcccggcgttgaaggggccgtgggaagtaacggggggtaccacggtttaggatgcgctggagcgaaaggattggggtggggtccgtgctcttggcagtcgtctctgccaggcctgtgttcacatgcttgactttctccctcagatgcctggagttactgtaaaagacgtgaaccagcaggagttcgtcagagctctggcagccttcctcaaaaagtgagtttggggactgaggttcaaaacgggtggaggctgtcgccttggcctgcccatctgagccccagtgtttgccggtccctggcaggcgaggcttgtttggggcctccgtggctcctttcagcgtgaggcctggcttgtgttccggttccagcctctctttgtactctgggcacagcatagttgtgttgaggggagggcatttgggatatggggtagtttgtggagatgactgaatcgtgcttttcccactgttttggtcttaggtccgggaagctgaaagtccccgaatgggtggataccgtcaagctggccaagcacaaagagcttgctccctacgatgagaactggttctacacgcgagctggtgaggaacttaggtctttggctggagagtggggagctgggtgacccctggcacaaaccatacttccctgtctcctctgagctctttcccgccccaagagggagagaaacccttggttgtgtcaccacttgctttgtgtgatgtgacattcgataacttggtactccaagtttttatgacattctaagagctttgtgagaggaggacctgtggctttgagcctcaggggaaaccagagacagatgaatgttcatattttgcttacaggtggtttaatcctttctatatacacggaggcagactccctgggtttggatccatcttttacatctggctgtgtgtcctctggcaagttggttaacctgcctgtgcactctctcatccccaaaatgggactaattattgtaccagtactagagtattgcaaggattgaatgaatttaaagcagagtgtttagaacgtgtctgttgcacagtagttattcaggaaaaagccagttgtctttactattgctcagatcatcaagttagccttctccatatctctaacaggctgtttctaactaaatggttggagatctggccaggtcagtccctgctttaaatcttgacttctgatcttatggacaccctgcaacctcgtgccagccccgtctcttttcaatcttccaataataatttatgtacagtccctgactagtgttagttctcacgtgtcttaatatttcagtactcactaaatcttcactttcaggaagatgtaacagggtgggcggtggcagtgccgtgttatgtcaaggtgacagccttagcaccgaccttcactaaggggcctcggcctctccaatcttaaaccttctctctctgtgaagtggggactccatcctgaccacaacttgtctccagataagaagtaggtgggaagcagggtttggaaatcggcaaaactcctccatgacccggaaaagagttggccttggtacaggttgcttggcccttcagaatatgaagcattttgtagatttgtggtacacttgtgcctcaaatgtctattggggcccactctttcaggccatggagtgagcacagaggaccagcataactcagccgcggcctctgaggactgaaagatgaacttgctgaggtgggtcgggttgctggcataccacctacccaccgtttgttttagacagaaaatggggcggatgaagagaagctgacttccctgggcgcacagcagtgacaagccctggaagttacatatctcctccacctgtccccccatcttgctttggcagtgcctcaagggtcagttggtcagagcagctttggatctgggattagcctttctcatttgctggggtgaagacacgttctgcacataccaaatacctccaaagtaggactgtatgtgtcttgtacatttttttttttttttttaacatggggagggattaacaagagatggcattaagaccttggataataaacctagttgcatctgctggtcatggtagagctgctgtggtcccttgcagcccacagtggccctgcctggaaacctcaagcaggatgtgcatcttctgcctgcctactgatctccatcacttggagtaccccaaaggcctctttttcacctcacttgcccagctgtcctagcggcataggatggttgtgtggtagaccagaggcctgttgtgtatatttttgttgggttatagccacccctgtgtatctacatgcacaagggcagagttgtagttgtggcagaagctgtagcctacaaagcctgaaatatttcctacctgaccctttattatttattttcagggacagggtctaggcctgtcacccaggttggagtgcagtggcacaattatagctcactgcagcttcttgggctcaagtgatcctcctgccccaccctcctaagtagctgggactacaggtgcctatcagtcaccatgcctagctaattttttttatttgtagagatggagtctcactatgttgaactcccaagctcaagcggtcctcccgcctcagccttccaaagcactgggattacaggcaaagttgaccagcctctattctagagtttaacatgttccacccagtttggcagtcagcttatactgatcatgggagtgatcttgttttaccaaagaggaagctgtggtgcagacgggcgaagggacttgctgcaagttaccctgggagggcttggcagggtggctctgtccaaaactaggttccctgctatattcccttttttctactcataagagtctggcctattttgcctcctcagatttgaggctaaagtgtgctaaagcagcgcccttgctgagcagggccaaattgtggagacctataggaatgagtgtgaggtagacaggtcttaatcctggggtttgggggtaaagaggcccatggtagaagatggggccctcttgagggtggtctggaaatggagcagagctgtaggagtaagcagtcccaaggcagtggtgtaggaggcagggcaaggtagaggaagaacccgcaaagacttgctctcactggacgttcaagggatggccgccatgggtctttatgaagggggtggtgcagtgtagccccggacaggcttttttttttttttttttttttaaacagagttgcactgtcaccaggctggagtacactggtgccgtctcggctaactgcaacctctgcctgccgggttcaagcaattctcctacctcagcctcccaagtacctgggactacaggtgcccgccaccacgcccagctaatttttctatttttagtagagacgggttttcaccatgttggctgggatgctctcgatctcttgacctcgtgatccgcccgcctcggcctcccaaagtgctgggattacaggcatgagctcccgcacccagctggacaagcctcttgctgtcttaattctttaaaggacctgctgaagatggagatgtgggagtccagtttggtgtcctggtgtgcgtctgagagcagctgctgaattgggatgtctggaaacacttcttgtaggttggaggctgctccatctctggctcctgcatggggctgggcacccacttgtgctatgatagtagaaagaatgagatctgggaggcatcacagaagtgagttaagggatgaatcaaggtcaggagagtggtttcttacaagttcggcagagaagggtcagctagagtgtgctggggaagttcttccctgcctttgactcagtaggtcaggatgggaccaccggtctggactttgctgagctgtgatgactcctaaggagccgtgcttggttggtctgccccgtgctcagatccagagggaccctccctctcggtctagcaggaacacagctgccctcccttgaccatgaactcacagtagagtggagaggggtggcctcctttacagttccaggtagggggtgattcctggacaggggttcctgagaggagtgggttgccatcccaagaatgcacacagcagaggagcagaaggcctctagcatggaggaactggaggagaacccatttgtgacagcaacttgctcgcaattggccctcatgagtaccagctacggcggtctgcatttgtgcagctccacatcaaaagctggggctggaaccttggtctccagggggtgaggaaaaaggtcagtgttttaatagaacgcggtatttcaactcttagcattttccaatttgtgaagttaataacccttcctctcccttctagtgggtcagaaaaaaataattagcatgaactgggatagcaagggaggagcttgtaatatctgaccaaggttctccatgccaaaaggtttttatacagccttaagaaaaatttaagcctccattgaagaacctaataggcctttgggaggccaaggcaggcggatcacctgaggtcaagagtttgagaccatcctgaccaatgtggtgaaaccccgtctctactaaaaataaaaattagccaggcgtggtagcaggcgcctgtagtcccagctactggggaggctgagacagaagaattgcttgaaccccggaggcagaggttgcagtgagtctgagatcacgccactgcactccagcctgggcaacagagtgagactgtctcaaaaaaaaaaaaaaagcacctaataggccttatgggagcttgttctctaccagtcactgtgctcaaggtttaagtaaagtgtctcctttagtaccgcagcacaaaccacctggaggataggtgggtcctgtgtccctcctgaggaggaacggtgtcaggattcaagctcctgtctgactgctctgggcgctagtcccaacccaacaagactgaggttgagtgtcccatttctggtgtacagccgctttgggcatctctgcgcttaggagtgtgtgccttattcttaaaaagcaagataacagaggcccggcgcggtggctcacacctgtaatcccagcactttcggaggccgaggcgggcggatcatgaggtcaagagatcgagaccatcctggctaacatggtgaaaccccatgtctactaaaaatacgaaaaaattagccgggcgtggtggcgggcgcctgtagtcccagttactgtagaggctgaggcaggagaatagcatgaacccgggaggcggagcttgcagtgagctgagatcacgccactgcactccagcctgggcgacagagtgagactccgtctttaaaaaaaaaaaaaaaaaaaaaaggccgggcgcggtggctcatgcctgtaatcccagcactttgggaggccgaggcgggcggatcaggaggtcaggagtttgagaccagcctggccagcatggtgaaaccccatctctactaaaaatacaaaacattagccaggtgtggtggcgtgtgcctgtagtcccagctactcgggaggctgagacaggagaattgcttgaacctgggaggcggagctagcagtgagcccagatggcaccactgcactccaacctaggcaacagagaaagactccgtctcaaaaaaaaaataaagcaggataacaggaaaagctattctgcgttccccagtcctgggtactgtagttcaaatgggagagcaggtctccacccagagccccagggcacaaccagctacagggcccagagggatggcagcagctgctgggtatttgagctggtctgaaagggtggaggtttccagtgatgtcactctctggcaggattgtggggggtggcttacgccaggtgagtctgtctattggtcctggttatgggcacttattaccaggcagtggcgtagggggtagggcctggagtgaggtggggattttaaagtgagcagatgccagaggtagtgagccaacagcagggctgtgctcttggcccccagcagagcatggttgtatagtatcagctgaggattggttccaggatgaaccccaatacccaagtccacagatgctcacccttactataaaatggtgtaatatcggggccaggggccgggtgcggtggctcaaccctgtaatcccagcactttgggaggccaaggcaggtggattacgaggtcaggagattgagaccatcctcgctaacacggtgaaaccccgtctctactaaaaatacaaaaaaattagccaggcgtggtggcgggcccctgtagtcccagctactctggaggctgaggcaggagaatggagtgaacccggaaggcagagcttgcagtgaaccgagattgcgccactgcactccagcctgggcgacagagcgagagactccatctcagaaaaaaaaaatatcggggccagcacagtggcacacacctgtaatcccagcactttgggaggccaagatgggtggttcacttcactccaggagttcagccagagcaacatggcaaaaccgggtctcttcagaaattatctgggcgtggtggcttgcacctgtagtcccaactattcaggaggtcaaagctgcagtgagctgttaccactgcactccagcctgggtgacagaatgatgccctgtctccaaaaaaaaaaaaaagtataatatttgcatatatcctatgtagatgttttacttttgagacagagtctcactctgtcacccagtctggagtgcagtggcatgatcttggctaactgcaacctctgcctcccaggttcaagtgattctcctgccctgcctcagcctcccaggtagctggggttacagcgggtgtgccaccacacctggctaattttcttgtaatttcagtagagatggggtttcaccatgttggccaggctggtctcaaactcctgacctcaggtgattctcccgcctcagcctcccaaagtggtgggattacaggcgtgagccactgcgcccggcctgatcccatatattttaaatcatctgtagattacttatagattaatacaggccagacatggcacatacttatagtcccagctacttaggaggctgaggcaagaggattgcttaagcccaggagttcgaggctgcagtgagctatgatcacaccacagcaccccagcctgggtgacagaatgaggccctttttttgtgttttaagaaaaaagaaaaagcactaatacggtgtaaataattgttacactgttttgaattgtagtttttttcccctaaatatttttgatccacccttggttgagtctgtggatatgaagggctggctgtatctggacctgatctcagggcaggagtgggctgggaacaagcggtgtgtaagaactgtttctgggcagaagcagcccaccccacacagactactgcctggcacttggcagttatggaagaacccccaattcccccacttgatctttagaactagaggaaagaaatcactagagcagactcagaccaacttgctgatctctgggtcccaggaacaaaccagactctgctctgagctccagagctaggcaggaccatgtgatggctgaaatctgggtgcttcctgcatgtgggccccggtgccatcacagtggcaggacagggcagttcctccagagctgtgtgacacggagccagtgagtaccctctggcacctcagtttcactctttaaaggagagtagcacttgacacacctgttgagtcctcagagtaacccggccctcaggtgaagaagggtggagagatcgaaaagcatttggcacagggcctggcagatgtgtgctccagttaatagaagcgtgcaagcgtttctggggaggctggtgtgtcgactggattttacggagctttttttgcaggcaaggaggctggctggggtggaccagggacttgcccaagccagccttccctgtgtctgcagaggggctggtacacattccaagcagggggcacccactgcacagagtgtctgccctgcccttgttatcctgagctctccagactgaggtggcccggagagtggcaataggtcccttcactcctgcttctctggggcccatggagatggtcacagctaggctccacccctacataacctcaggttcaattcaacagcagtgctgctgggatagtaaccactaaagaagttggccctggagatggtgggagtgcccacccagggtgcagggctgtttgtcaaggaagagctagccgggggggtgggtgaggagagggggctgtcagtttctgggtgttagtgtgtgttttcagtttcccttcttataaaacagtgagaattagctgtttacacacaaggaattgtttacctgagaccttgatcaagacccttaaatctccctctcacactacccccagcttccacagcgcggcacctgtacctccggggtggcgctggggttggctccatgaccaagatctatgggggacgtcagagaaacggcgtcatgcccagccacttcagccgaggctccaagagtgtggcccgccgggtcctccaagccctggaggggctgaaaatggtggaaaaggaccaagatgggtaagcagggtagagggggctgcattgatggagtagccttgaggcccggtcatcaattccccaacgaatggtcctgcatagtctgcccagcccctcaggcccctcctatcagaggcaggcaggaggggattctgcagaaaagcaaacagcacggggcctcaccccgacctctctggctgactagcccaggctccaggagggtaatttagcgactatctgctttcattagcctgctcgttaacttttcccaattgatttttcggggcttttgatctaaatgcttgcacaaacaacaccccgtcagctcccaggggggctcccactactgcccccagctcgttagaatgcacctgactagggccctcagtgggacttggctggcggcaggtggctttttgagaagcctggctcacagccaggagggaaggggctgagaacaggacctgtgctcactggggcctgcatgacccttccctccccacagcggccgcaaactgacacctcagggacaaagagatctggacagaatcgccggacaggtaaggcctgcgtttggggtggggctgggtcccttagtcgctgcccaagcatttccaaagcccatactttgtcaggtagacttatttccttctctggagggcacagcccagggtgctggtggggtcagaggagggctgcccagagacaggagaaaggacagtcctgtctgacttttcctgttggtgctgcttagaaatttggaggcaggctggctgtggtgtctcacccctgtaatcccagcactttgggatgccgaggcaggcgaattatctgaggtcaggagttcaagaccattctgaccaacatggagaaaccctgtctctactaaaaatacaaaattagccgggtgtggtggcacattcctgtaatctcagctactggggaggctgaggcacaaaaatcacttgaacccgggaggtggaggctgcggtgagccaagatcatgccattgcaccccagcctgggcaacaagagtgaaactccatctcaaaaaaaaaaaaattggagggaactccagcccaggtgccactgggcatctatccacagagcacatagctgtacccgtagatgactccccctccccaggtcagcctgcgatgtttccccttagtcctcatgcgtactgagcatcacatgggctgcttgggagaggtggagataagggaggggggctggttcagaacccaggtctccattcagatcctggctggccaacaccctggggcagagtggccacacccctggtgccacagtctcctgtcttggcctccctgtggccaaaatctacccttggccacctcaagcatggtagtgaggagtcagtgagctatagtacagcaggagcacccagggcctggcatgagctcaattctgtatcactgactcaggcctcctaggagccttggagcatttagtcagtcaagtgtcacaaaagaatggaaagtgtcagccctctaggagttgggggtggtctggaaggagaaagctcttccaggcagagtggggcttggcgcacacatcattgctggtggttggatgttggccttctcacatggcagtgggcggaatttggactccactccgccactcccttcctttttttttttttttttttttttttttttttgagacagagtcttgctctgtcgcccaggctggagtgcagtggtgcaatgtcagctcactgcaacctctgccacctgggttcaagcaattctcctatctcagcttcccgagtagctgggactacaggcacacaccaccacacctggctagtttttatatttttagtagagacagggtttcaccatattggtcaggctggtctcgaactcttgacctcaggtgatccacctgcctcggccttccagagtgctgggattaaaggtgtgagccactgtgcctggccactcccttgagactcagtttccacgtctgtgaaatgggggaatacccacagtgagaattagatgagatagatgcatttgaaaccacaaatcggggtgcccacctgtggtgggtagttaggtagctgttacaaagtgccccagcagagacccccttgactaacttttattcttccatcttttcccacaggtggcagctgccaacaagaagcattagaacaaaccatgctgggttaataaattgcctcattcgtaatcctggtctgggtctcttttttgagtctcttgctctgtcgcccaggctggagtgcagtggcgccatctcagctcactgcaatctccgccttctgggttcaaatgattctcctgcctcagcctcccaaagtgctgggattacaagtgtgagccactgtgcctggtctggtttgggtctcttgattgttcttcaggggcatgaggaagaggcgcttcctcccttcccttgggtgagggggcccagggtgattgggtggctgtttacccggcagccagtcgggccttcccaggtcaaacagttcccatctgggtttggaggaaggacccaggggcccttgtggctcactcccccacatcctgtctttgcaattgtcagaaagtgagaaacgaaaggatggctgtgagctgtgacctcagctgggcctgggctgcagaggtggcttccgctggagtaaagcaagagggcccagggttcatgctcttccctggaaggtagaaaaggacagaccaccagggagcctccaccgcaaactgacctgtgctgcctacacactaactttcctgggcctggggcctgcacaggctgaatggtccttgagccttcactctgcatctgagcggtcttgggcccgctgagtggcagtggcaggaagtcggtggaagcagatccctgtgcagaagttgaattaccagggcggccacacacgggctgcacaacctttgcagtcgtgcacggcaagtgggatgtggcctccgcccatgattgggcacctggtcaggctgggagatccaaatagcacccagtgggcagctgtccgacccctggaggggcaagccaggaaagaaacttagggcccgctgtgaccagatgtccctcccagttgggaagactaaactggtttggccaatatctcccaggattcccctgtccaaattattcctgggatctgacccatttcctggaaaggggcgagcctgggttttgaagttcaaactagagtttaaatcacaactctgcccctaatcccacgtaaccctgtgcaccttatcctctgagccttcgtctcctcgtgtgtaagcctgctaactcctgagagactggacaagatgccgtggagagccttggctctgagtagctctgctgctggacagttcagttggcagtccccaaacgtaaggcgtaagagtttaagaagtatcggccaggcacagtggctcacacctgtaatctcaacactttgggaggccgagacgggctgatcacctgaggttgggagcttgagaacagcctgaccaacatggagaaaccctgtctctaaaaataccaaaattagttgggcatggtggcgcgcacctgtaatcccagctactcaggaggctgaggcagaagaatcgctcgaaccccggaggcggaggttgcagtgggttgagatcgagcaattgcaatccagcctgggcaacagagcgagactccatttcaaaaaaagaatcaataaaaatgttaaaagcaccgttgtttacactcagcaactctgtgaagtaagtgccgaaaagtgctttggaggtaggtaaagtaagccataggctgggtaacttgccagatatcccacagctggagccatcatatgaacccaagcaacccagctgcagcctggacctagccactccaagggctctgtgcctcagaaaagaggcccaaagggttgcactctagctgcaggccagtcactccccattctgggctctagtttcctcttttggccattaatgaaaacatttcccagagctgacatgagaactcaatgccaagcgtccggtttgcacagcagcaggcattgcgcttcccaggtaggaagcaaggtctaggtgtcccgagcaggcctgcaatcccgcagccgcgccgctccagccactggggagcagtagagggcctagaaagaagctcagccaccgaaggctcttgaaggtgaattcctagggcttccaggtctggagccaggcttattcctgggagggggttgtaacggggaattgaagtgcagaggggctagtgaccccagcagaacacctggggtcctggttcccagggctacagaactgtcctagatactgtgccaaatgcactgcagaatattcttgcagtcttatcaagtggggggtttgtacccatgttataggagaaaaaactgagtttcagatgaccagtcagttggcagagctgagttgtaaaagaatcctggactcttgaggcccaggctcttctgcgtggatgggaattgcccttttcccatctcctgggttcacgccattctgcctcagcctccccagcagctgggactacaggcacacgccgccatgcccggctaatttttgtatttttagtagagacggggtttcactgtgttagccaggatggttttgatctcctgaccttctgatccgcccgcctcagcctcccaaagtgttgggattacaggcgtgagccaccgcgcccagctggcaattgcacttttttaaaattctgcactctaggaggcagaggtgggcagatcacttgaggtcaagagtttgagaccttggcctggagtggtggctcacacctgtaatcccaacacttggagaggccgaggcaggtggatcacctgaggtcagaagttcgagaccagcctggccaacatgatggaaccctgtctctactaaaaaatacaaaaattagctggacgtggaggcaggagaatcgcttgaatgcaggaagtggaggtcacagtgagccaagattgcaccattgtactccagtctgggcgacaagagtgaaacaccgtctcaaaaaaaaaaaaaaaaaagagtttgagaccagcctggccaacatggtgaaaccctgtgtctatgaaaaaaaaaattggctgggcatggtggtgcacacctgtaattccagctacttgggaggctgagacaggagaacagcttgaacccaggaggcggaggctgcagtgagccaagattgtgccgccactgcacttcagcctgggcaacagagcaagactccatctcaaaaaaaaaaatctgaaatacttcaggcatgcaagtatttagcattcagtattcataatgtaagaaaaacctatgaagcacaacccagtttaagtaacacaggcagggcagggtgcagtgcctataatcccagcacttcgggaggccaagctgggagaatcacttgaggtcaggacttccaggccagcctgggcaacacagtgagaccctgtctttacaaaaaatttaaaaaataggcccagtgcggtggatcatgcctgtaatcccagcactttgggaggccgaggcgagtggatcatcaggtcaggagattgagaccatcctggctaacacggtgaaaccccatctctactaaaaaaatacaaaaaattagccggtcatggtggcatctgcttgtagtcccagctactcaggaggctgaggcaggagaatcacttgaacccgggaggcggaggttgcagtgagccaagatcacaccatcgcactccagcctgggctacacagcgagactctgtctcaaaagaaaaaaaaaattaaaaatagccaggcatggtgtgtgcacctgtaatcccagctacttgggaagctgaggcaagagaatcacttgagcccaggagtttgacgttatgattatgccactggacaccagccttggtgacagagagaggccctatctctaaaaaagaaaaaaaaaaaagtggccagccacggtggctcccgcctgtaatcccagcactttgggaggctgaggtgggtggattacctgaggtcaggagtgtgagaccagcctgcccaacatggtgaaacctggtctctactaaaaatacaaaaatatagccaggcatggtggtggccgcctgtaatcccagctactgaggaggctgaggcaggagaatcacttgaacctgggaggcagaggttgcagtgagccaagatcacgccactgcacttcagcctgggtgacaaagcgagactccgtctcaaaaaaaaaaaaaaaaaaagtaacacaggaaataaaaccaagacaagatgagctctctgtgtctctgtgtgtccctccccagacccaaccctggcgtcccccagaggtaacccctcccaggaactgggcgtttgccactcccctgcacgggtctacacctctgctacaaacgtgtgtccctaagcagcggacgccttttgaaaacaagtcaactgtatcatgctacgatattttttctgatgtttgtgctgtttctgagacagccttatgacaccttcccctattctgtagcattctgttggctcactttgccacagtgtatgcacccattctcccacaaatggacttttcatttgcttctcaatgtttgctaccaaaaatctccctgcaataaatttattttatatatccccttgtatgtgtgtgagggtcccctaactgctcacaaatatctcagcaactccgccctccccactcagacctcatttccctcctaccagacatgctcaaaggaaactgggagcaacacaaagatgactttgaatctctgtccaccacccctagactgtatgacacccgcaagtgacaacctcccctctctggcctcggtttccccctctgtaaaatgggggatggcctaccttgccagtcatggcaggtcaatataaaacaacttctggctgtgcacagtggcacatgcctgtaatcccagcactttgggaagctgaggcaggaggattgcttgaggccaggagttcaagaccagcctgggcaatatagcaagatcccatccctcttaaaaaaaaaaaagaagaaaaatatatgttgttgttgttattattgttattattagagacagagtttcgcttttgtcacccaggctggagtgcaatggtgtgatctcagctcactgcaacctccacctcctgggttcaactgattctcctgcctcagcctcctgagtagctggaataataggcatgtgccacaacatctggctaattttgtatttttagtagagatggggtttcgccatgttggccaggctggtctcaaactcgacctcaggtgattctcctgtctcagcctcccaaagggctgggattacaggcataagccaccatagctggcctgtttttttaaaaaaagaattccagtaaagagctgatcatggttctcactccttgaataccaggaacaccatctcgtatcacataatgagacagggagacattctggtcctcatctcacagatgaaaaatgtcaagcttcgaaggatcaaagtgcccacctagtcacacgggtagtcagccacaggtcagcctgccttatttattcttcatgagtatttatagtgactaacatttactgggcgcctactgtgggccatttctgtgcatgtgacaacccctttaagtccttgtttctaatcccaagaagcaaggaaatggggtcagggaagggacaaggtttgcccaagtccaggcagggggagaggtcaagctcagaaccatcacctgcccatgacacatgcccaggactcaggttccctaggcttccttccaaaggctcagcagtgacgagccagcccttgaaccagcctcttcccccacccaagcagccacctctcaggggaattgtggccaccacaggtgcagggagcagtttctctccactcacagcctgaagcatacccggcaggggctgtccccaggcccaacaagcaaagggcccagtagcgagggccactggagcccatctccggggggctgggcaggaagtagggtggggtttggggtagggatctggtaccctgggactgctgcaactcaaactaaccaacccactgggagaagatgcctgggggtccaggagtcctccaagctctgcctgccaccatcttcctcctcttcctgctgtctgctgtctacctgggtatgtggccaaagggcaggaactggcgggaggtgggggaagctgtggaggctgcagagagggcacaggcagagggaagggggctcagggaaaggggaagaggaggcagaggataggggacccagggaagatgcctatagaaatcgtatctgtgccaagatgggccaaggtggggctggagggagcccagcgaaggagaaggggcgtccacagtctcacacagggaggcaggagcaagagtcacctcccccacctcctgttccccacaggccaaaataaggaactaaagttgctcttgactgagcaccagggctgggggcaggaaggggacttaggggtagcagcattcagcgtctgtcaaggggagaaaaagctttctctgccttaaacctcaggtgcctctctctgttgggagtcccttctcagcactgggggaatgggtgtctcatggactccccctcacctgctcaaggacagctggcaggggctgtggccacgctaacccaggagttcagagaaaaaggttccccacccaaggggacactgggagcaaggattggagttcacgtctgagtcttaagcccgtgacgatgagggtgctcggcccctctccccatctcttcctccttctctcttcctcacctccctcctccacctacctccagaagaggggactggccatgtgggaggcctggctgagagctggggcttcccagaggagcccggattggacactgcagccagcctgagccgcctcgtctcactcagagacacccccagtctccaccccgctctgagccccttcaatcaccagcagcccagcccaaggactgaactcacccctgacccctaggttgacacatacaacttacagagaatgagggccaggcacagggtcacaggccagggcaggccacagactggctcctcagcccaggcagggagaggccagggagccaagagtttgaacccagtgccactcctgactgcctggtgatgctggcaacccgcctgccctcccagagcctcagccatccctcctgtaaaatggggctaaggagagaacctacttctagggttctgtgaatgattacacaagaaaaagcgccaggtgctgggcctggctgaggctggggtgcaaaaatggaccgggaaggctgcgggaggaggggacgcctgcactgcttctggaaggagctgtctggacagcggtcctccagtgcctggaacaaacatccaaaatccagagagttcacagggccagagtacaaagtgggtatgcgggaggggggcaagagatggcgctgcagaggtgagaagggcctcccaggggtcttaccatcccagggagtctcattctcctctcccaggatatcctcacccaccccaaccaggtatgtcctctctccttcccaggggcttcttcactttcccgcatcccccctctccccaggatgtatcagcccctgtcaggggctctctctctccctccccacccaggagagtcctcaccctcttcccaggagtgctggaactgcaggggccagggctggggaaatgtgtcaccatccccagtccctgacccacccaccctgtctctccacaggccctgggtgccaggccctgtggatgcacaaggtcccagcatcattgatggtgagcctgggggaagacgcccacttccaatgcccgcacaatagcagcaacaacgccaacgtcacctggtggcgcgtcctccatggcaactacacgtggccccctgagttcttgggcccgggcgaggaccccaatggtacgctgatcatccagaatgtgaacaagagccatgggggcatatacgtgtgccgggtccaggagggcaacgagtcataccagcagtcctgcggcacctacctccgcgtgcgccgtgagtggcccagccctggcccctactcccactgtcccgctggggacactcggtttatctttgaagtggggatagagccagtaccttcaatgtgggtttcaaaccggcttggacagagggacggacattctcctctgcagagtggggtctctggggggtctggggccttgcaggaggtgggcggggccaggaggctagggagggcaagaggggccagggctctgagccatactacctccttgcagagccgccccccaggcccttcctggacatgggggagggcaccaagaaccgaatcatcacagccgaggggatcatcctcctgttctgcgcggtggtgcctgggacgctgctgctgttcagggtgagccccctcggacctctgagtcagccgggcgagggcctgggccgagggacccccaatacccaggtagccctctagagcctgaggttccccatccaaaacttgggagaatgaaagcacccaccatataggggctgtgggagttaaatgaatgaatataaagaagggacttgaactggcgctgagcccagggggtgtcttcaatttagtttccccttctgggctgtcctcacgtccacctccccccaagaagagtctcattcttctccctaagagtgtcctcactcccctcctgccctcacccaggagtgtggttaccctccaggtgtagccaagaccagggaaggtggggcctggtcctcccagaatctctgatctgtaccagcctctccttaggcactacagaaagtgtgactgttattgttattattcatggagaatagtaagggagtggagactcaagaagacgctagcttgggaggccgaggcaagaggatcacttgaggccacaagtttgagaccagcctgggcaacacagcaagaccctatctctacacacacaaagtcttaaaaaaaaattagccaggcatggtggcacacacctatagtcccagctactcaggaggctgaggtgggaggattgcttgagcccaggagttcaaggctgcagtgaaatatgatgttgccacagcacttcagcctgggcaactgagggagaagaaagagagagagagagaaagagagagagagagagagagagagagagagggcgagagggagggagggaaggaagggaagggaaggaaggaaggaaggaaggaaggaaggaaggaaggaaggaaggaaggaaggagaacactggttgtagactcagagagaactgttacataaccagtatgtggccttggggacatctcttaccctttctggaaaagtacttcctggcatccaggagggtctgaaagatattcacctccccctgctcactgaggcacccaccccacccacccctacagaaacgatggcagaacgagaagctcgggttggatgccggggatgaatatgaagatgaaaacctttatgaagtgagtgaagggtggggatggggtaggggcagttgtgttaggggtgggggtgttccctctgggggtggctgggggcagggaccccaggtgtcagggtgctgatgttcgctgcctcatttccatcccagggcctgaacctggacgactgctccatgtatgaggacatctcccggggcctccagggcacctaccaggatgtgggcagcctcaacataggagatgtccagctggagaagccgtgacacccctactcctgccaggctgcccccgcctgctgtgcacccagctccagtgtctcagctcacttccctgggacattctcctttcagcccttctgggggcttccttagtcatattcccccagtggggggtgggagggtaacctcactcttctccaggccaggcctccttggactcccctgggggtgtcccactcttcttccctctaaactgccccacctcctaacctaatccccccgccccgctgcctttcccaggctcccctcaccccagcgggtaatgagcccttaatcgctgcctctaggggagctgattgtagcagcctcgttagtgtcaccccctcctccctgatctgtcagggccacttagtgataataaattcttcccaactgcagaccttggcaggagtcgtggatcttacgggaaccgcctctcccacatgtccctcagacccaggagtcccagcccaagccactccctgcccactccccacacctgggaccaggtagccagtctgggctgccctcctgggagaacaagatgtctcttgggaaggtccccagaccaactgaaggactggtttggccctctttgcagggcctcaccctagggtcatatccttaagcaagaaggggacaagatcaagatggctgtggctaccaaattacttacacttttttttttttttttttttttgagacagagtctcactctgttgcccaggttggagtgctcactgcaacctctgcctcctgggttcaagcgattctcctgcctcagcctcccaagtagctgggattacaggcgcctgccaccatgcccagctaatttttgtatttttagtagaggcggggtttcaccatgttggccagactggtcttgaacctctgacctcaggtgatccacctaccttggcctcccaaagtgctgggattacaggcgcctgccaccacgcccggccgctttttttttttttttttttttttttgaggcagagtctgactctgtcgcccaggctggagtgcagtggcgcaatctcagcccacttcaacctccacctcaagcgattcttgtacctcaggctcccgagtagctgggatgacaggcatgtgctaccacacccagctaatttttgttttagtagagacagggtttcgccatgttggccgggctggtctcgaactcctgacctcaagtgatccaccatgcttcggcctcccaaagtgctgggattacaggcatgagccactttatgcgtatttaagccttggaaacacagggactatcttgtggattggggctagtacagaattcagactgcagccttttcccgatgcgttgacttacagaaggggcattttggagggtctgtggtcctaacctggggatagcagggagatcccggggcaatgacagagaggcacagagacacggatttcctgagaaagggagaggagagaggctgagacccagggatcatgaaggggacgagcaagggaaggaagagatgatgagaccctgggaatccgggagagagacagggacgtggagagaaagggacagagagagagcgagaaggaaaggaagagacagaagggagaaggggcaaccgaaaatgggcacgaagaggcccaggcacagcaacagctggggaaatgacagagactgagacggagatgcagaaagatacagagagagctggagagggtagagaagggctttcggggagaaagtgatggagggacagagaggagaggtggaggccaaggagggaaagaccccagtagagaaagacagagggacagagaaggggatgcagacgcaggcgggagcacacccacagaggcgaaggaagggcgcaagaccatgagaaccacagacgcggaaagccggggaggtcgtggctcggtctagggcgcacggggagcagggcttgccccccagcacctccggggaggtgaccccagccgggagatgcgagtcccgcggagcccgcgcccggcggacggaccgatggacaaagccggggagagctcgggcgcggccggggcgggggccggtgcccgcagggacccgggcgcagcggggaaaggaggggcgggcaagcggcgagaaggggaaggaagcggaggtgccgggcgggcgcggggcgcgggcaggaagcggggaggggcggcggggcgggggcctccggaaaaacgccccgacttcctgccccgccagagccaggaagcgggagccgggacccagggcccgggatcgccgagcccgacctcgggcgccccgccggtcacctccgcgcggacaccaggtactcggtccccggccccgcccggcctcctcccctcggctgttgggggaagtggggaggaggagggaggggctggggcgctgccggcagcggaggggcccccttcggaccccacggaaccagcggccgcccctccttgggcctcagttttcccatctgtcaaagggagcaaagaggggagaactcacacttgacgagtgccccataggtggggacgaacggtgcgaggccggggccaaggcctcccacctgctcagtggagaacggacgatcactaccattgtacgggtggggaaaccgaggcccggggagccaaaccgactcgtcccagggaacgcacatcgtgagaaagtgtggagttgggatttgaactcgcacgtgctttccgcaaagcgccatcctccaacccccgcatgctttagggccacctaaaaatgaaaaacaacaataacaacaacgacgagggtcgctgtgaagctgaaagttgcagagtgcatttgaaagagttttcggaaagctcttttctaggtcattaattataccgtgagagacaggtgtagggagagagctggaggccttctcccattgtacggatgggaagactgaggtctacagagaagtcattactttttgcagattacactgcatgtcagagggaaagttgtgctggaactcaagactattgcttttccggttccaaaggaaggggctgggggtgggagacggaggggattgatgtacgaggattggaaattcagcgggtcccctaagtggggagactaataggacggggagccccagtccgccgtccgagtgctcagcgctggggtgactaggagatctccgatcgaactcgggaggagttggacccatctgcacctccgggcgcggggcggggcccggggagtgacgggggcagtcgagatacggaaacgctggccctccaagacaggccagagcggccctatctggcctgcgtggcgcagtacagcgctagagcggccggcgggaggagtagagtcgtcggggccggagcccggcaggagccgggctagagcggctggcaggaggagtggagctgggcgcaaaggtggactcagggcggctagagcgacgcggcggcaggggtggggagagtgcggagcccgagcgcggaggcttcggttccggtggcggcgatggcttctctttccacctggagcaggtgagggacgcggtccccagcgggtgtcagaccctgactctgcacgtcctccccggcatccctggccgtgcacactgccacgtcccccgtaggatttagggcccgcgtaagacccgccacgtccatgtaagatttgggtctcgtgtagacccgcctcattccgtataaagtcttacagaccctccaggttcctgccagccccccatggagaactggcttcttatagacgtggggtcctcatagaccagtggcatcccctagaatccggggctctatagaccatgggtctcgggacccaccacgcacccctatggaattctgagtcccttttaagtctccagaggttccacagactggcagctgtccctatagaatcatgatcctgtatgatccctggatcctttagacccactgtgtgtcaaatagaatctggggagttacacattccaacgactcttttaggttctttaaggctccagaagttcttggagaccctgagtcacctgctcaacacattatagaccctgagacctccatagaactcaacacccatgtggccccccaacccatggaccttctaaaccagccctaaccccccagcgccccatgcacgcagtgttccctctgctggaccccccaggccttgtcagttgcctatagatccatctattctctgacagcttcacctataattctccagcctttgtgggactcccccaaacccctcctcctaaacaggcgacactcctcgcctccatcatctccaacccccaagcctctgtggagcagccgtatccaacttgcactcctgcctaggccatagtgaccacatacccgtgacttttccaggcatccataagaagacatgatgtgtctcagagctttggttcagattttagtttctgaagggtagggtgggggctccccatgctctgaagcaatgctctctgttttattttgttttatttatttatttatttatttttgagacgaagtctcacttctgttaccaggctggagtgcagtggcgcgatctcagctcactgcaacctccgcctcccggattcaagcgattctcctgcctcagcctcccgagtagctgggactacaggctcgtgccaccacgcccagctaattttggtatttttagtagagacagggtttcactatgttggccaggatggtgtcgatctcttgacttcgtgatccgcccgccttggtctcccaaagtgctgggattacaggcgagagccaccgtgcctagcctattttattttaagacaaggtctcactctgtcgcccaggctggagggcagtggcacaattttggctcactgcaacctctgcctcctgggctcaggcgatcctctcatcttagcctcccaagtagctatgactacaggcatgaaccaccacacctggctatcttttgtagagatgggggtttcaccatgttagccaggctggtctcgaactcctgagctcaagtgatccacctgccttggtctcccaaagtgctgggattacaggtgtgagccactgtgtccaccaaatgcagtttattttaaatgcgtaaactctgtagcccaactgcccaggtctgagtcctggttctgcctcttatgagctgtgcctcagtttccttctttgttaaatggaggtgagaataataatgatctcttggagtcaccgagaggattaaatgagttattacctgtcaaccagcgatgccatgcctggcacatactaagtgtctcttttgtgtcagctgtcatttcattattattgtgataaggaataaggagataagaacttggcaagtgcacagttccagacctggcaccaagcacttgcaaagataatgagtatcccctcctttgcctttttaaaatttccctgcctcagttgagcgtttctacctctgagtgggatgagcatgcaccctccacgtccgtggtcatgtttcatagtgagacagggtctcactgtgttccccaggctggtctcaaactcctgagctcaagcgatcttcccaccttggcctcccaaagtgctggggttacaggcatgaaccacctcacctggccagtttgcaaatttattaaagtgaatgtttaacagtacttgaatcttgaattgcccaagcttagatattggacaatacactttgtgggaaataataaaaatgatgccttccccaggtggacccacagggtggcatttggacactccagaaagcatcattgtttaatcatcaaaatcctggttaccatttactggggagctagggaggaggcccataaagcaggagaagggcgggtctctgctggcttgggttataaatagctttgggctgtggggagccccgccgctggtccaccccacccctctttccacagctccttcccacctgacacgggctccgtggcattagtcagactaattaaggacacagaagatgtcggtggaaagactcagagagaagtggagactcaaggagagacaaagatgggagagacagcaagagatgggggagaaaaagggatggagagatgagagacagcacatgagactgtgactcagagaggtgtgaggatggtggctgcagaaaccagatgtgggaggacagaggcacagagacagggacaggacagacggagctacagaagcaggaagggggtgtcaccgctgagagggagagatggagggaggagaggcagggatggtggggaaaatgagacagttctggaggaagggaaagagaaaaatcaggaaacagggtgaaaagagaccaagacatgagacagattcaagggacagacagccaaggagagctggctgcggacagaccaaggcgcacgtagggtggaggggacagacgcaccttggagatgggctgtctgaggccccatcacttggtttctgggactggaagcctgggaagagatgaggtccctgggggaaagaagaacttctgggtttggggactcccagtccctgagggaggagggttctgagttttgttttcttatgtggagagttgggggttgggggtttgccattgtgacttcctgtcacaggaagtggggctggtgggttccaaggcaacatcctgtcccaggcctgtcacagaccagaggagacccctgcaccccacttctctcccgcctctcctctaaccctcccatcccctcttgcctctgggctgtgccctcaggaattagcccccaggcccctggtccctccaacctgggagtccaggcccccagccccctcttccattagggcattagggaccccagattgcaggctgtcagactcagccttcccatggacccaggctcctgagcctccaacgcctgcccccgcaaggctcccgtccctgggctcccgccccctggcgggtctctgaagggctctttgtggccacacagaggccccattgagctgcggaggctgggatgggggaggctgtttactcaccttcacacctgggccaggaatctgtgagtaaccaccctgggccgcctcctcccaccctcctaaccacagcccctcctcttcctccagccctgcagagcccagggagatggaagacttcgcccgaggggcggtgagtggacagagcaaggggtgaggcgactctggggctgtgggtggagagtcctgtggactgaagctgccctccctttccacaggcctccccaggcccctcccggcctggcctggttcccgtcagcatcatcggggctgaggatgaggattttgagaacgagctggagacagtgagtgggagatagggtggaaaagctctgtcccaggctcagtgtcccgccccaggtcccctcccacctgcagatgctgtcttcttggccttttcccacggtctgtctcatcctctcatctccctggtacctccttcctcacctcgccgaccccacacagcagcatagacgcccacccttcttactcttaaccccatttcttatcgttgctctctcctcccccagcatggaccccaatttcttctctcctaatttctgtcctcatcatccaccattataatattaagtctcatccattctccctgaacacctgcccttgctgtcaccatcattttttggacactgtcaccactccccacttcccaggagctaaccctggcttggatcccttgtgaagtgccaggaatgggtagggtcaaccctaaggcccctcctcttctccccattgtactcaccccttcctgcacccccagaactcagaagagcaaaacagccagttccagagcctggagcaggtgaagcggcgcccagcccacctcatggccctcctgcagcacgtggccctgcagtttgagccaggacccctggtgagggcagggctgggtgggcacagggaggggtggggctgggacaggcacagcttttagcgaattaaaccagcgagctagtgcctggagggtctggaaaagcagatctagaacacagagagccagatctagaaagagagaatgctttagacaagagccagaaagcatgccacgtgacctcaacaggcttacaagtgcccagggtagatctcagtgcgcagcgggcagggtacacacgtcaggaccccgcggagccacagagagtccagcagcctggcagaaaccacatcccatcccactctgtgcctgtggcagcgcccccatcagcctgtggcagcacctttccgtgaactctaggggaccaaattcttctctccaaagcctttttggcagatgccagcacgcagtcattcacggttgatggttgggaaaaagaagctgttagccatcccaggtctagggagcacagcaggccctgatctggaaacaagaaaaccaccacacacagctcacaaggcagaccacacaattgtggatccagaagcctccggatgaggcagaagatacctgggagatgtggatggacaaccgtgccatccagaaacacccgcagagtctagaaaacccagcaggtgatttagaaagggagaggccacagtgctggctggcaggggatctgtagacaagggtctcatcccaagaagaccccgtccagcccagcacaggataggaggacagcctggggacagccagggcactgcaccatgtggacatgcatagtggacccctccagaaaacaaggaaaccgatagagtggggagaagtgcccgaggcatgcagaaagaagaacatgtcagctgcaagaccagaggctggtcatccggacgccaaaccatcagatatgcagaaaattaggaaattgcagtctttcccctgtctacattctctttccagaagagtggttcccccgacaaccacatgcacggagactctggccctctgagcaagggagtcccctattcaagccttggggtttctagaacaccagattgtggacatcagcccagggatcgtgctgactaccatgttcttttacagatgtggaaaccgaggcctagagagggtcagggacttgcctgaggtgaccccggcggcctctgggcattttgaggtttattctcgcatagctccctcacctcatcagcttgtggggagccgatcagagatagctgtggtcccctgggcagcttcctgttggcctgtcttagaattttgctatatttggggggtgtgaagagtggatatagatgtgttaaaactgtttaaagtggagaaggaggaccgggcctggtggttcatgactgtagtcccaacgctttgggaggctgaggcaggaggatagcttgagcctgggaggttgaggctgcagtgattgcaccactgcactccagcctgggcgacaagagtgaaaccctgtcttgaaaaaaaaaaaaaagtggggccgggcatggtggctcacacctataatcccagaactttggaggctgaggtgggtagatcacttgagatcaagagttcgagaccagcgtggccaacatggtaaaaccccgtctctactaaaaatatgaaaattggccaggcgcagtgactcacgcatataatcccagcactttgggaggctgaggcaggtggatcacccgacgtcaggagttcaagaccagcctggccaacatggtgaaatcccatctctactaaaatagaaaaattagccaggcacagtggtacacacctgtaattccagctactcgggaggctgaggcaggagactcacttgaacctgggaggtggtggttgcaatgagccgagattgcaccattgcactccagcctaggcggaaaaaaaaaaaaaaaattagccaggcctggtggtaggcacctgtaatccaagctactccagaggctgaggcaggagaatcgcttgaacccaggaggaggttgcagtgagccgagatcacgccactgcactccagcctgggtgacagagcgagactccatctcaaaaaagaaaaaggagaaaaagtcccactcccattggagtgagttcatttcccagatgagagcccccaggagccaggacaggttggagtccccactgtcacccagaacaggggcgggcactcaggaaatgcttgacgaatgacagagtgagccccacttgtccacctgttctttccaagccctcagtatgcacaaggcaccaccatctgggacacagatggatcaacctacaacacccctcaacacacacaaacccttaagctgctcacagtctttccaggcagtggagtgtagtagagacaggctgcctggattcgaatcctaactttgccacttagtagctatgtgattttgggttttatttatttatttatttatgaaacagtctcgctctgtgtcacccaggctggagtgcagtggcacaatctccactcactgcaacctccatctcctgggttcaagcagttctccctgcctcagcctcccgagtagctgggatcacaggtgcccaccaccacacccgactaatttttttatttttagtagagacagggtttcgccatgttggcctggccggtcacaaattcctgacctcatgtgatccacctgccttggcctcccaaagtgctgggattacaggtgtgagccactgtgcctagcctagttgtgcgactaagcttgactaaacttcttgagctccgttttctcatctgtaaaatggggataatgacggtccctatgattgaacacgttaatgcatgtagagggtgtagagccgtgtctggtatacactaagccgtcagtatagacagtagtagtagttgttgtcattattgccgggaggagaccatgatgaagaaccacaaaggaccatagcacaggatggaaaattagaaaatgctcatggcagccccagggagcctgcaggggaacccagggcctggctttaggggtggaggtcagggagtgcttcccagaggaagtggcagttgagtcccacagccataggatggccaggaggtgaggaaggcccttttcaaagggagagtgtggtttgaggcagggtgagggagcggagagtcatgctgtgtgtctcccccagctttgctgtctgcatgccgacatgctgggctcactgggccccaaggaggccaagaaggccttcctggacttctaccacagcttcctggagaagacagcggtgagagaccttcaagctgccccaaccctgcaatccctgtttgggcctgcagagtcaccatgcggtccccagcctctgccctgagggcagctgctgacccaggccttccccagcaccctcgcttagaccagggttcctggcagtcctcccggcctgcatctcagcacaccaagtcctcctcttcaccccattctctctcttgagcaggttctccgggtgccggtccctcccaacgtcgcctttgaacttggtaaggagaaggatgggatgagggagaggtgtctagcggggaccacacctcccaggaggccaaggggagggaggccgcactcccatgctctgctcggacagccgagattcattcattccttcttggcagcggcctcaggacgtgtggctgttggagtccaagggtgggtggggaccgtggtccaagccaccagggagctggaccctagcccccatgtgtgtccctgcagaccgcactagggctgacctcatctccgaggatgtccagcggcggttcgtgcaggaggtggtgcaaagccagcaggtagccgtgggccggcagctggaggacttccgttccaagcggctcatgggcatgacgccctgggagcaggagctggcccagctggaggcttgggttgggcgggaccgagccagctacgaggcccgggagcggcacgtggcggagcggctgctcatgcacctggaggagatgcagtgagtaggccagccctggtgggagcgtcgcccctccccagcacaagggcacccgtgctacctctggcatgttccatcccgtttgcaggttccctcttcagggtcagagttcatttcttggcactgggggtcttcctctaccctggtgttttaactcaccttgaatccgagtcttccctttccagctttggggttcccttgtcatttctgggtcttgtccatgatctggcacttggatcccatcctcctggatgagagacctccctccctcttatgacagtccttcccaatcccttccacagtgtcccctctctgtctctcttccccctgcctatcccaggacagcaaccctgagatgtatcctgggtggatggggaccccaggcctagcaaatatgtcacaaacatctctcttcctcctacagacataccatctctaccgacgaagaaaagaggtgaggggggcaggggaggcgtgcggcctcctgggtttgagggaggagggggctgagggcctggactcctgggtctgagggaggaggaggctggggggcctggacgcctgggtctgagggaggagggggctggggggcctagacgcctgggtctgagggaggagggggctggggggcctggacgcctgggtctgagggaggagggggctggggggcctggacgcctgggtctgagggaggagggggctggggtcctggacgcctgggtctgagggaggagggggctgggggcctggacgcctgggtctgagggaggagggggctgggggcctggactcctgggtctgagggaggaggaggctgggggcctggactcctgggtctgagggaggaaggggctggggggcctggacgtctgggtctgagggaggagggggctggggggcctggacgcctgggtctgagggaggagggggctggggggtctggactcctgggtctgagggaggagggggctgggggcctggactcctgggtctgagggaggaaggggctgggggcctggactcctgggtctgagggaggagggggctgggggcctggactcctgggtctgagggaggagggggctgggggcctggactcctgggtctgagggaggaggagcctggggcctggacacttgggtcctgggcattgggtaacagcccttgcccctgtccttttgaaccctctcatctctcctcagagtctcacaggaagtagttgtggggtcaggatgggaaggccgggcctctgcctctagggggagagagagagagtgtgtgtgtgagtgtgtgtgtgtgtgtgtgtgtgtgtgtgtgtctttgtgtgtgttgagccctcactgtcccttccctacagtgctgccgtggtcaacgccattggcctgtacatgcgccaccttggggtgcggaccaagagtggagacaagaagtcggggaggaacttcttccggaaaaaggtgcttccctcagtgccccgtcctgaccctttcctctccagagacgccctgggagcctcatgactctggatacctagcgtcaaattctgctttgttgttgtctcagagatgcttagcctggtcttcctccccgccctctcacaggtgatggggaaccggcggtcggacgagcctgccaagaccaagaaggggctgagcagcatcctggatgccgcccgctggaaccggggagagccccagggtaaggcggctctggcctctgccctcccctgtcttccccagctgctcccactcactgtctcattctctctcgtttcagttccagattttcgacacctcaaagcagaggttgatggtaatgtacctgtagccatagcatccatactgggggcctgtgtgggagaggctaggacctggacgcctgggtctgagggaggaggggctgggacctggacgcctggttctgagggaggaggggatgggggcctggacacctgggtctgagggaggaggggctgggggagctcctgggtctgagggaggaagggctgggcctggacccctgggtctgagggaggagggactgggcctggacccctggctctgagggaggaggggctgggggagctcctgggtctgagggagggaggcctggggcctggacccctgggtccgaggtaggagggattgggcctggacccctgggtctgagggaggagcggctcagactcggactcttaggtctgaggaggaagggctgggcctagacccctgggtctgagggaggaggggctgggggagttcctgggtctgagggaggaaggcctggggcctggacctctgggtctgagggaggaggggctgggggcctggactcctgtgtctgagggaggaggggttgagggctcctgggtctgagggaggaaggggctccttgtcatggtggggaagggcctgagcacagcctcttgcatcccctggcggttgtggatttgagttactgttctcttatctccctctttctccctcactgtctccccagccgagaagccaggtgctacagaccggaagggaggcgtggggatgccctctcgggaccggaatatcggggctcctgggcaggacacccctggagtctctctgcaccctctgtccctggacagcccagaccgggaaccaggtgagagtttcctgggccagggctccatgaggcccggcgatccagggtgggggtgctgcctgcccccttggcacccccagatagaagccattccccagcaacacctcccctttgctctcagcatccacttctccctgctcctggtcaccactgtcattcataactttccccttccctcagtttgccctttccacagctttgctcccaggctctgacctctctgctggtgctgcgtctcccacccccttggactacgttttccatcaacccttccttttccagaaccttccctgagtacatgaccagtccaccctctgagctgcattgctggccccctaggtggggagcccgccagccccatgagcttcatccctcaccatccttacactgctgtggcctcaggcccttggatctctgcatggccaggccagggctcacacaccagctctgctgactgcttgtgtttatttagtatcttggatatgactcccctttcttagcctccgtttgcttttctctaaaggagtatgagagggtggggaggatgaatggacgtggaggcagcacagaatccagggccctcccgacctcagggggctgcagtctggttgggtgggagagatgtttgtgacctatttgctaggcctggggtccccatccacccaggacacacaggggcacccacttctgttgcatcttcatgctcctgcccctagtggccatgttctgagaggtcttaacatctgtccgtcccgtgctgaagtacagagcagccatgtggtgtctgccaggcactgggtagctttagcccccgcaattccaggcccccagagtgtgggtctcgtggccgcagaggccttccagccagccctgctccctccaccccacaggtgctgacgcccccctggagctgggggactcatccccgcagggcccaatgagcctggagtccttggcgcccccagagagtaccgacgagggggccgaaaccgagaggtgcccaggctggggtgcaggggcgggaggtgtggcttactgggcgctggtgggtgggtgcagggtcaccgctgccatctgtgcctgcctgtcccaggctcttgctccccatgctcctctgctgctctctgggtctggccattcctctcccttcttctttccttttctcatctccctcctgcttcctcattgcccccctttccttttatccttcctttttcctctgctccttcctctccttccttttttcactaatccttctcctcctcccttcctctccaccactccttccatctcctttatttccccctcctctctcacctcccctctcctctctcacctcccccatcctctctcacctcccccctcctctctcacctaccccctcctctcacctccccgctcctctctcacctcccctctcttctctcacctccctcttcctctctcacctcccccctcctctctcaccttccccctcctctctttcctccccactcctctctcacctgggttttctttccccaccttccatccccctccgatctccctgccacttttcattttttcagcccttcctccccttctctttcaagcccccctgccccctgccccccaccccccgcctcgctcctgcctcctggtgcccgtccctcaaccccccacccctctgctctgtgccctgggggccctgtcccccttacagctggggggcaggctctgcctcctgcccgtccttgtgccgctgctttggggaccctttggtgggtgcggggaggtgggtcaggttccatctgggcccacctctgaccctgtgcccctctctccccagaaggtggaagaggtgggtgcctgggccctgggtgggggaagggctagcccctcccccatttctcccagcccctcccctctccccatggccactccctccccttcactccctgtgaggggtgggtggggacatcaccctcccagttgaagagctaagtatggaaatcctccccaccccataacaccccctctgttgccatccccctgcctcagggaagggagggggtcagtcctatgctccatcctgggttccccatcccttcccccatcaaatttcagtatcccccctcccccaagaccccccactaccccagtgcccctaaaatcccaccactcctctgactctctcctctcttctgttgcatgtttgatccctgtcctggtcacccttgccccggtcctggtctctccctgtctctgtccctgtcctggtctctccccgtctctgtccctgtcctcgtctctccccaatttctgtccctgccctggcctctccccacctctgtccctgccctggtctctccccgtctctgtccctgtcctggtttctcttcgtctctgttcttgtcttggtctctccttgtctctgtccccggcatctgcctgactctgtccttggcctcggggtccaggctatcagggcgtctggggcgctcagagagcctgcgggtgagtgaccgccgccggccttcccggggcagcctcggggctaagggccggggtgggggccgctcccggagcgacgtggacatggaccccagttccgccacggcagtgcttggccctgcccgacgagccacgtatgtcaaccctctcccttcccccatccactaaggcagcctggagaatcagggagggattgttgtcagagtcacagaggaatgggcgttggagaccgaggtcattgaggccaactgtggtcacagaccttggaggaggagggggtagaatgcttctagagatctgggaactctagtgtggtccgatctagagacctggtctgctgcacgggccaccctgcgggcatcgaatgccaaggccactgaccggggttgaacgctctaagaggctgaaggctgcttcttgggatggcccaagctggggccctaacaaggcctctgtccacagccccgagcctggagatgagggggagccggggcggtcgggactggagcttgaaccagaagagcctcccggctggcgggaactcgtccccccagacaccctgcacagcctgcccaagagccaggtgaagcggcaggaggtcatcagcggtgagtactgcccccatcaccccactgtggccaaggacacagtccagctctggcaaaggcaaagacaggcgcagagagatgttcatcttggtgtcatttaccatcgggagaacttgaaggcagcttcaaattccctcttgttccaagttcagattgtttcaacacagagcattttgatggaatgtgaatgccactgtggaagggacatttccaaacatttctagtagtgcaatacagtgctgatgttgagaacactgcatttctggtgcaagcttttatttccttgcttgtgaaatgtgggcattaatagttcctacctcagatattgtcatgaagatgagatgatttgtgtgaaatgtttagcatagtgctgggcacagaggaagagcattttattttatttatttttttaaatttttatttgaggcagagtctcagttggtctctcaggctggagtgcagtggcacaatcacggctcactgcagccttaccctcccaggctcaactgatcctcccacctcagcctcccgagtagctgaacaggcatgtaccaccatgcctggctaatttttgtattctttgtagagatggggtttcgccatgttggccaggctggtctcgaacccttgggctcaagtgatcctcctacctcagcctcccaaagtcttgggattacaagtgtgagccaccaggcccagtcaaggaagagcattttaatgagattgttgttactagtttgatcttaattgcttaggggagaaaagatccccacaggggaaagtttgggagaatgatcagtatattagcagtgcttgcttctgcgtggagagatgatgagtgtatcatttttgtctttttccttttttcctttgctaattgtgtggtggctagggaggctggtggcaaaaagagaaagctttttttttttttttttttttaagacagagttttgctcttgttgcccaggctggagtgcaatggcacaatctcggctcaccacaacctacgcctcccaggttcaagtgattctcctgcctcagcctcctgagtagctgggattacaggcatgtgccaccacgcccggctaattttgtatttttagtagagacggggtttctccatgttggtcaggctggtctcgaacgcccgcctcagcctcccaaagtgctgggattacaggcgtgagccactgtgcctagcccaagagaaaggtttgggacttgactgaaagcttatttacagattacttcatagtgaaaaagatacttattcaaaaattttaggggagtagttgagtactttttgggtcacagatccttctaaggacatgataaaaaaaaaaaaaaacatgagccatgtgctacccattaggactttctggaagatggaaatgtgctttatttgtactgctcaccatggggaccatcggccacctatggctggtgagcacttgaaatgcactaggccaggcacagtggctcatgcctgtgatcccagcactttgggaagccgaggtgggcagatcacttgaggtcaggagttcgagactagcctggccaacatggtgaaaccccatctctactaaacatacaaaaattagccaagcatagtggcgcatgcctgtaatcccagatactcgagagagtaagccaggagaattgcttgaacccaggaagcaggagatggaggttgcaatgaacccagatcactccaccacacttcaatctaggtgacagagcaagactgtgtctcaaaaaaaaagcactaaatacaactgagcactgacttaaaatttcattgcaattaacgaaaatgtaaagagttgtacacggctggtgactatcacgttggacaggatagcaatttctttccccagaaagaatatgcataatgtacaaaatcgtgcttttagtctcaggggacttctagggcccctgaaactcacacatatgccctccggggatgtgggggtccctggatctgaggctgtcaaccactgtataatgtggcttgatggttagacactaaacacagctgcaagcttgctggcaggtgggatgactagcttgtccccatttgctcaggatattcacagttttatcactgaaagcccaggcaggcaaatgaggaccattggtcactctggccagctgccacagcgaaaagggaaaggcagtgggttgaggaatcctcactggttttttttttttttttttttttttgagacgatctcgctctgtcgcctaggctagagtgcagtggcgtgatctccgctcactgcaacctccacctcccaggttcaagcgattgtcctgcctcagcctcccaagtagctggaactacaggtgcccaccaccactcctggctaatttttgtatttttagtagagatggggtttcaccatgttggccaggatggtcttgatctcttgacctcgtgatctgcccgcctaagcctcccaaattgctgggattacaggcatgagccactgcacccggcccctcagtggctatttaagagggcaaatgactccacccggagagtttttttttttatttgtttgttttgttttgtttttttgagacggagtctcgttctgtcaccaggctggagtgcagtggtgtgatctcagctcactgcaacctctgtctcccgggttcaagagattctcctgcctcagcctcccgagtagctgggactacaagagtccgcccccacacctggctaatttttgtatttttttagtagagatggggtttcaccatgttggccaggctggtcttgaactcctgaccttgtgatccacctgcctcagcctcccaaaatgctgggattataggcatgagccactgtgcccagccattttgttttgagacaaggtctcgctctgttgcttgagctggggtgcagtaatgccatcatagctcactgcagcctcaacctcctgggctcaagggatcctcccacttgagcctcccaagtagctgggactacaggcacacaccaacatgcctgggctaattttttttcttttttaaatttttggtagaaacagggtttcaccatgttgcccaggctgatcttggactcctgggttcaagcaatcctcttgccttggcctcccaaagtgctgggattacaagtgtgaaccaccatggctagccagagagagttttttcccaccaacttctaggaagctttcctccctgctctgcctcattcctctagcctgcccatgaggtcatgccccctagtctgcaccctccccaacatgcttcctgctttggtggccctgcagagctgctggtgacagaggcggcccacgtgcgcatgctgcgggtgctgcacgacctcttcttccagcccatggcagaatgcctgttcttccccttggaggagctgcagaacatcttccccagcctggacgagctcatcgaggtgcattgtgagtgcagagccagggtccctctgtgtaccccactgccccacgggcagctctgctctagccctgggttcaacctgctcgggaaccccagggttcacatggggtgggggcagatacgccatccggtcccgaggatcagacacagacacacctgcagccctacccccaccacaccgcagcaggccccgcacagcatcttccagaccctggtggagcatccctttcctcctgcccccacagccctgttcctcgatcgcctgatgaagcggaggcaggagagtggctacctcatcgaggagatcggagacgtgctgctggcccgggtgagatgcccagccctcccgctcctcccagctagacacatggaattcaggcccgggacgggtcctgagcccaccctactccagtcccagggtctgggcttccagcctgtcgtactttagtccctgttcttgcccatccccactgagacacctgcctggcctgaatctcgctgtagtttgatggtgctgagggctcctggttccagaaaatctcctcccgcttctgcagccgccagtcatttgccttagagcagctcaaagccaagcaacgcaaggaccctcggttctgtgccttcgtgcaggtgaggtggggtctggactccagcttcccagggaggaggggcctggagacccagactcctaggtgcctgcgccctggggtgagcccaaagcctgggccatcgcaacaccagcatgtttcccgcaggaagctgagagccgcccgcggtgccgccgcctgcagctgaaggacatgatccccacggagatgcagcggctgaccaagtaccccctgctcctgcagagcatcgggcagaacacaggtaccgcgggcctggatctctgggcctcggctctcctcttttttttttacattttttttctcactcattttcatcagtgataccatcacagctcactgcagcctcaacctcccaggatctaccatcctcccacctcagctccccaagtagctgggaccccaagggcacaccaccatgcccagctaatttttttagtttttttttttagagacggggtctcgccatgttgcccaggctggctttgaactcctggtctcaagctatcctcccgcctcagcctcccaaagtgcttggattacaggcgtgagccaccatgcccggccagctgtcctttgtctaaccttggctgcccaatctggagcctccagggcaggggttcaccagagctgctctctcccttgcctgcagaagagcccacagaacgggagaaagtggagctggcagccgagtgctgccgggaaattctacaccacgtcaaccaagccgtgcgtgacatggaggacctgctggtgagcctgggctggccccacacccgggacagtggatggtgtgagagcagggggtggaccctacctcagcctgtccagaagtcacaccccaccccttggcttgtctccctcaagggtcactgtgtccaggggttggcttggccctcagcatctccctctcagggtcattggaggtcaggcccaaccctcagcttgcccgcatcagaagttggtcttggctctcatcttaccaatgtgggtcactgcaggtcagccccagcacttagcttgtccccataatgctcccgtctctgccccagaggctcaaggactatcagcggcgcctggacttgtcccaccttcggcagagcagcgaccctatgctgagcgagttcaaggtgtgaccataccctcctgcctcccccgcccccctactccttggcccaggggattctgtgatacagcccccagcctgtcctgcccatcccataatacacccaggaagcgagagctctgtcccccacctcatgccaatcccatgatccccagcctgtggtcatccccggccactgccctgcccttcccctccccaccaaccccaatcaccccctgccaacctgcacaaaccatcaccccctcctgccccagaacctggacatcaccaagaagaaattggtccacgagggcccactgacgtggcgggtgactaaggacaaggcagtgggtgagtgccagagcagctgcctagtgcagggtgttggggcagtgagccaagggcggggagggggtcgcgcgggggcacgccgtgtgagcactgctcgccccgtagaggtgcatgtgctgctgctggacgacctgctgctgctgctccagcgccaggacgagcggctgctgctcaagtcccatagccggacactgacgcccacgcccgatggcaagaccatgctgcggcccgtgctgcggctcacctccgccatgacccgcgaggtggccaccggtgagtgcagccactgcatggcccagggcagagggtgtcttttttgggcagagctgcctgtggagtggggagcagaaccctctagagagccagggagccagcattctagcaaagaggttgagaagtaggtggaggtgggcagggcggggccaggcctagagggtttataagtgaggtaggaactgctgcaggtgtttgcacagaggcgtgtcttgtgtaaacaaggagaagaaaggccaggagtccagtgaggagggatttgtaaacatactactaggaagttgcaccagggccacaaacactggaagcggctggagggtgggagtggctggaggggtttcgttaggtaagccagggtacatgcccgattccataaggaggtgtgagaggtggggctcaggaggacacatcgggccctggatattagcagacagtgagtggtgagttgagccatgggagccctgagagcgccaccactgtgggtgacttctccagcttgtgcttagggaggggcaggcactggggggacctgggctctgagccccatctccccctctccctgcagatcacaaagccttctacgtcctttttacctgggaccaggaggcccagatatacgagctggtggcacagactgtgtcggagcggaaaaagtgagggggggtctgagttctgagtgtgggtggaggacgcccaggtttctgggttcccagggacaggagggctgtggggaggccctggcatagggtctgggggctctgactgcccagggatttggcctttctccccagctggtgtgctctcatcactgagactgccggatccctgaaagtccctgcccctgcctctcgccctaagccccggcccagcccgagcaggtgaggggggccatggagagagctggaggttcagggagtggggccggaaggcggggcaggcttccctccacaactccagaaccgtctctgtgtgagcatgcacatgtgtgaatgcatgtgtgtgcatacatgtgtgtctgtacgcaagtatgtgactgtgcgtgcatatatagtgtgtgtatgcatgcatgtgtgcgtgtgcatgtgtgtgcgtgtatggtgtgtgtgtatgcatatgtgtgcatgcgtgtgacagcatgtgcatgcatgtgtgtgtgtgtgcgcatgtgccgaccccaccactgccccgtctgtctcctgtctccaggcctctgtgtcttccattgtctgggcctctctgtctccctgtctcccggcctcgacctctgtctctgtctccggacctccctgcctccccacctccagctctctgtctccctgcccctgcggccccccagggccaggggtgtggggtcacccagcacttcctcccctcagcacccgagaacccctcctcagcagctctgagaacggcaatggtggccgagagacgtctccagctgatggtgagaccagagggatgctgggtgaggggccaggttggggctgccgggtgaagagaggcatccacaggaggcccggcaggatctgagctccctctctgttccccaatccagcccggaccgagagaatcctcagtgacctcctgcccttctgcagaccaggccccgagggccagctcgctgccacggcccttcggaaaggtagcccagctctgcccctccagggtggccaccagcccaaacagtgcctctgttccaactagaacaaggctctccacgtcaaaaatttccttacgcccagctgccagaaaacaaatgctccaaacccacccagcctgcaccactgtcctgggtgcccacgtccctcttctgcagccaccatcccttgcttgattctatatttagcctcttcctgaacacatctctgtcttcagtaccttcctgccctgtcccaaccctaaacccagcctcacttcttcacctccctttggatccccgaaccccatctgctcagccttgcctggcacccaccttcacctccagcccctacacatcccctttggaatcccccatcccagatcccagcccagccccctggtctcctgactccacccctccttgcccctggccagtgctgtccctgaagcagcttctgtttccggcggaggaagacaatggggcggggcctcctcgagatggggatggggtcccagggggcggccccctgagcccagcacggacccaggaaatccaggagaacctgctcagcttggaggagaccatgaagcagctggaggtggggcgggacgggccaggggtgccctgagtgggctggggaaggaaggggcccccctcatccatgacccccaccccaccaggagttggaggaggaattttgccgcctgagacccctcctgtctcagcttggggggaactctgtcccccagcctggctgcacttgaggttcccgcccaggaaggtgagtggggcacctgggggccagggcgctgtcctgaaaggagggtccccctccagagctcgcatccctacagccccttctgtccatctccctctttgtcttttctgaatctccccactccacctcgtgtttctcatctctgtgtctctgtttctgataatctgtttctctgtctctgtgcccgcctgcctctccccacctccccttctctctctgctctccctgtcttgtctctgtgtctgtctctccctgtctctctctccatctctccccgtctcccctcttctcctacatcccccaggccttttgcaagaaggagaggaatgggggagaggacgtgagggaccacccccacccacacagctgccgcagcatctcacaccccgagggcctgaggagagggagctgtgggccacgcctgggaggggcccagctggggttactggccccgcatgagcctcggccatctctccctcctgccctctgcttgggggactcagggctccattctggagggcaccacggtgacccgggccatctcagtattgcctgtgggggccacccctccacccccacccccaagtgccttcgctctgtttttataccctgaattggaggtttattttttaatatatattatctaagaagagatctgtgtgtgtgatggcggggtggggcctggcatggcgtctggaactctctgtgactgtctggcgttgacatcctgggtctgtgcctctgcgcctccctccagttgttcattcattcattcattcatttctttgtttgaaccgttactccccaggcactccgtacacacactgggtatgaggcgtctccctgacaccgccctccagctcccacccccgatcccccatgctcagcactgggcaccccgagtctcactctctgttcttttatttctgtagtaaactctctggaggtgactgttgggatcatggggagctggtggggaggggggcccctcctgggtgggggctgggggcggggttattgctctgagctccctgtccccaggggggcctatatggggggggtgtcaggactggggccagcacagggggtttggagacacggccacacaaacacttggggcatagcacaggggtgggcgggcggggcaggctgggcgccatattgcactttgggagtggggccaggcggggacccccctcaaactggagcctggggaggaggccggaggccatcacattccctctgtcctctgtggagggggaagtgagaccccccccactctggggctggggaaggagactggggcagcaatgtgcccagacctgggaggtgctgagggctggtcctgggccttgggccaggcatcaagggcagacgggcagccaccctggtccctgcctcagcagaatccattgccccctgccggctcagctgccggtcccccctttgcccgcctttgccttggggggtgccgggagaccctcatcgccctcgctgtcagagctgcagccgctgacgtcggtgatctccagctccgagtcgctgtcctccttcccaccaagggcagcctctggacccccagcccctggcagcgccaggcgaggggccgctgccaggcccgaggggcgctcggggcccaggccctcccctgtcgaggccagcaggggcgtggctgtggggcctccccctgcccctgacgagggcaggtggcccagggaactggccagagggttggggtagaaatgcggggggtagagagagggaggcagcttggggaaggggcccgtgaggtacgggttaaagttccaggggtactcagggaaggcgcggccataaggacccagcaggccagggggcttggaatagctggtggcacctggggggcacaggggtaggtcaggctggggcacctgcctgcctggggaccagtaaagggggctgcctccctgccatatcccaccccatctccccgcatccctcctacatggcatcttaccccctcatacagcttcccccaactccatctcctcccactcccccacttgtcttcccattccttaggcacccctgaaagcccctgtctccctcatttcccctccctcacatcacatccttttctgggttttacacacacacaccctacaacctggccctgggcccccttccccatctcttctcttgtcttttctcatcctcttccctcaagcctgcagcttctcccactgtgcccccagcaccccagaacctccaggctcttaccagagcccaggaatgggaaagggctgtccagacgcaatttatctgtctcggaggtgaacaggggtgtccgggcccctggctctcccaggcgtggggcagagaacagggtttgcagggtctagagagggagtgggagaagccgcccttctcagactgtcccctccccagagtgggcaccaagtgcctcggttccaggaccccagtacccagactcacctcaggggtgaggggaggagcatctggccctggggcccccccaaagggactgggggtcagcaagagtggggagccagtggcagctgccgccatgtccagcagcgggtaattgacaagcacgactttgctgaagttgaacttgtaggtgaacctcttccctttggtcttgtggagaatccgcttgttgtagtagtaactgtggggagagtggtggtgttggggaggtgcagggggagccctggggcgggatctggggtttcttaatgcgtgtgctgtcccaggcatggtgcacagagcactagaacttggggaaactgaggctcacagaagtcccttaatagggatcacagggcaaggaagggatgaggcaggagcggggaccctgccctgcaagactccaaagcccaggtttaggggtccctcctcctcgcctcccttccactcacaagtagcgatggtggctactcacgcacagccctgtgccttgtgggatccagcaggaacctgccccaggatgcagagggggcaccagagggacagttgggggaaaaggacaaggtgggatccagccccaagcccttcctcaccgcagggcccggctcagcttgtcgtaattcatgtggggcttgcatttgcgaataccccacagccgggccacctcatcggggtctttgatgacgaattccccgtagtccccctgccaggctatgacgccctggtactcctccttctgcagcagctccaggataaagtgccacagctggatctgcctcgagccaggggatgactctggcttgtaggcccaatccgggaaggcaaaccctggggacgggaggcagggagtggcctggggtcaggatgccaagtccagggctctgggtcctgctggactcagtaacctgggaggcatgtagttctcctccagtctcaggcatctttagggacctggtttccacactccaaacctcctccctttgtgtctggtccccaaattacccaaataagggcaagaacccagtcatccagggaccctgggttggtaccagtctgatcccctaccttggcatagctcccccaggctcagcatccagaggtggagttgggagggactggcttcctgcacccatgacagtgaggaggaatggggaggggcacccgcctccaacagcgttagtcctctcactgcccccagccagccctaggaggtctctagtctcttgtaccctgcggtgccctcagctcttactgtctctgttccccattccctgtcccctgctccacctttcgacattccccagagccccccactgacccatcctggcatatccaggctgcagctctgtgcatgtctgtacctgcctgtgtatttgtacctttcccgtccctgtgtcccctccaccccatatccatgcccatgtccgtccaagagcagtccagaacgatgtgtgtgtgtgcgtggacacacacatgcccacggaagacatgtcacacagacatcagttcacttgcctgagacacacagccacactgggacacaggcacaccggagtgccacactcatgctgggggccaccaaggctgacatggcagacacaggctgcgcaagactcaaggtcacgtcatctcaacaaccccacagtgcacacccatcacaacacagaattacacatctcaagactgggacttactaacaacacaaatgcctgacaagacacacacaggaccccaaatgcccaaagaacacactgtacgatggagacggtgaacacagcaccaagatatccatgtccccagacacacagggtgacagcatgtcagtagagcaacttcccaaacctgcacacagaggcacccacatgtcagcactgacacccccggctcactcagcatcacgtctcacatgcagaggggagtactccactgtccacatacccccaggagctgggcaccccgaaatctcatctcccatgcagaaggccccaagccctgggtccaacttctgtgttcactcttatgccacatcctctgtccccttccccctcctcagagaccccagacccaggcatgaaaatagaaggcagagtgagtccataaaaagctggcagcagtgcaggagagaggagactgctgtgcgccagggcaggggagaccagcatcgccgtgtccacttgctgtgtgattacgggcaggtccttaccctctctggtttagaactgcacaggtggaaggcaagggggcgcagggtcccacccaggctgcctggtgtagaaaagtgggtgcttgtgcctcccggcctgaaggccggggagctccaggcagtctccttgagggagaatttttatctccattcatttttgggtctttctcacctcccatgacagggctggatccagactccagctctgacccattccacacccagaacacatcctactggggaggcaactgtatcacagacacacccacaggaccccaaggtgacaagaggacacccaacccgatactccatctgtcctcaaatgcacaccctcaaatatgttgtacctatgaggcacaggcacagctagagagaggacccccaaactcagtaggcagacacacacatgtgacagacaaacccccagaattcactcatgtgcacatggaccctacgctgaaaaccagacacagcccccaacacagaggcccagggatgcatcccccccacagccccaaatgcaccaagacagccatgcggaacgccacacaacccgagacagaccgcaagaaacaggcaaaggctcctcaccccactcaggcagaggcacagtcggagagctggcagacgcccccatcccaaaatgcggacacgcccagcccagagacactcaagtagcctcagatgtgcacgtacaagcaaatacacaagctcacacaaagacaggctgtgcagacacattctcccagtgtgaccccttctagaaacactgaagtgtgacacagggacacactgaaatgagaccccaaataaccaaggacagagtctctgtctgtctctcacacacacacacacccctcccgctgcacatcagcatggtgtctgaccagcttcaccgtccaccaaccccggttgcaagctgtcctctttcctgggtctcggtctggccgggtcgtgcctgcacgtacccctgactgggcagtgccgtctgtctacctgtccatccgtgcctggcctagtgccccctccagcccagtccctgctctcttttccccgcaggtcctgcgtgggagcaggctgagacgtgcgtggcagggatgcccgggcctcgggcccctccgtcctcacccctcactcacttccgtaccctcccagaagacccacctatccccccagcacgcagggggcaggggaatctggctgcgaagtttttagccaagtttctcagaaggggtttgatttgggggactgaccaagactgagagagaaggacccacggactagagtgagacacgtggagacacggagagaagggggatgcggctcactggggaagcctgaggggtgggggaaggggtgggggaggtccgggccagttaccgggggtccagagagccggcagggcgggcggggcgaagagaaggtcggagacgcagctacagtccatggcggagccggccctgcagaggccgggagggacacacggggacggggtgggcaggagagacagacacaggtcagccagcggggcgctgcccggggccttcccctctcccaggtccccaccccagcctgacaccctctccccgcaatccctcctgcccactccctcccgcaggcaccgctctgtccccagccgttcccggccccgagaccccgttccttccctcccagcctctcctcccgcagcctcctcctcactcggtgcctccatcactaactacgccgctcccagcctccctccccgctccccgccactcgctcacgctctcacactcgctggctctcacgcccgcccgcccgcccgccgctcgcgccccgcaccgtctctgctgccgtctcccgtccccgctctcccgcctgacctcccgggtcggtcggtccctgcgtctctgggtctccctctgtctctctctctggctgccccagatttatcttgttctataacttgcccccacacccgccccacccggacgacccccaggcgggctcttccagcccaggcgcagccctgacccgcagccgcccaggacgggctgcaggggggcaggcccagcaccccctcctccagtcctctaccccacagggcagcccccagcgccctgcaggaggcctccacagaccctagacctgctgctcaccctgaagacccctgtcacttggatctgcctccctcctcagacaccccttcccctcacatctgcctcccctgtcagaccccctccctcagacactccctctccctagatatcttacgcccctaagatactccatcccctcctcactccagtctccccgcacctttccccctcttatggcgcctcccctccacacacacacccttgcaatccactccctctcacacccctccgcagacacacgctgccctcgcgctcccgagacccctcccctcaggcacttcagcccctcactgccaccctcacaccccacctctggagcaccttcttcctggagaccccccagacgctctcaaaaacccactcctcttagacaccctgatactccccactgctcccatgcgccccccagccagaaacccctcagaccctggcagcccacactgtgttcccccgtgagccccgcctacccctggacactggacaaaacttttcagacaccccatgtcccctcagactcgcccggtctccccacagaggccccaacctcagatgcccccacctcccatctgcctcctggagcctcccctgtcccaggccccctctgttcccacacctgtctccccgtctttctccatctgccccgtctcggtatctctccctctccatctctgtctctccggtcacttggtctcttctcccttccgtctccccccaccatctcccttccatttctgtctctctcctccaccaagggggtctctctccccacctcactgccctctccctctcgtctccatctcctcctccacccctcagtctcttccctgtttctccatctctcacccctgcttcttctccatctgtctctccatcttcccagtgtgtccatctctgtctccctatgactttctccccatctctgctatccgtctttccctccccttccaccatctctgtctccgtctctccctccctttccaccatctctgtctctccctccccttccaccatctctgtctctgtctctccctccctttccaccatctctgtctctccctccccttccaccatctctgtctctccctccccttccaccatctctgtctctccctccccttccaccatctctgtctctccctccccttccaccgtctctgtctctccctccccttccaccgtctctgtctctccctccccctccaccgtgtctccccccctttccaccgtctctgtctctccccccctccaccatctctgtctctccctcccctccatcatctctgtctctgtctctccctccccctccaccatctccgtctctgtctctccctcctcttccactatctctgtctctccctccctccccctccagcatctctgtctctcctgtctctgcccccaccgtgtccctgtcccgcgtctctccagcagccccgctcccccacacctctcccccacccatcgctctcccacctcccgctctctttgcctctcagggtccccctccttcctccccccgcccccaccccctattggcccctctcatttccgtgttggttttgatttctcttcccgacgctttcaactccccgccgcctcctccggacacgttataacgaggagccgtgggatcggcgctccgggccctgctcccacgctccccccgccgtgtctcacacgcgtctctgccatctcgcagtctctgtgcccagccttcgtcctgtgtcaggccccacagggacctggacccctcgcccttgcccatcgcctctgccgccctgtccccgtccgtctgtccgtccctcccatctctgggtctccatgcctccctgtctcttggttcccacgtcgtctccacttctgtgtccccacgtctctgtgtccccatgtctctgggtctccacatggctctgttttaatgtctagggtctccacacccctgtctccgtctccacatctccatatctcctcctcctcaagtccctgtcctgtccccatgtcccccatctctgtctcatctgtctctgtctccatgccccatctccctgtctctgtgtctctgtctccatgtctccatctccatgtctctatgtctctgtctctgtttctgtcccggtgtccgtctcttggggtccctttgatctcaccctgcccctggcgcccccctggccccattgatcgctgatcgactgatggagggagcgcggcctgcggggcctggggctgcagggccaaacagggcctggcaggacggccggacagatggacaaacggccccagccccagtggctgtggatggggagcagccacaatcccccacccccctcccccccgccggccggcgtggtgcggatgggtactccaggcaagctttaatttttaattttattttgcttcctccacccccccttcgccccccatctctaccgcccgcagccatggcaccgaatgtgtgtgcgcatgtgagcgaagcggtgtgcagaggcgctgggcaggcgagggccctcctcccttctctccctgccaagcacaaccacacagacccacacaccaacccaggcacgcacaccaccacgtcccacacagcacacatcgcacagatgcacacaccagcacagccacacacacaccatcacataccacacactgcatgagcccacatgtcaacaaagtcacacacagcaccacgtcccacacaacacatcacacacaccaacaaagcaacgcataccactgctgccacacacaacccacatcacacagatgcatgtgtcagtaaagtcacacaccaacactgtcacagtcacacacacacacatcagcatagtcacagatgcacagaaacagacacacagttttacacaaatacacacatgacacatcaattcaatctcacacagaaacaaagacacaaaatcacaaatcctagacacactgtgtaaacacataatcacacactgaggctcacaatcaaatacagaaacccagattcccaagcacacaatcgcacactgagacaacagcacacagaaacagacacacagtcacacaaccaagcaccaccgaccctcgagcgcatacatatgcacttggtcacgcatggagccgtagagatacacacaccagcaccaacccagacagccaacgcacacggccacacacacacccattcacagacacagtcacaatcacacacacacaccaagatcacggacccaaacatacgaccgacagcggcccctgcagaggtacacacagacacacccagacacactgggtaggggtgggcactcagagatgaccccaacccaaggcccctgccactcctgctcccaccatccccatctgtctgcctgtccctccatctgtgaacttcccaagcatgtctctgcatgggtgtgtgtgtgtgtgtgcacatatgtgacacgtgcccttgtctcagacctgcttctgtgactgcctctcgagacacaggtctctcggtctctctcagccccttcgggtgtcggcgcatctttctgtctgtctctgtcactgagggtctctgtctgtctctgtcagagagggtcttttctgctcatcttggcctgcctgtctttctaaatatctccatctctgagtgtctctgtttcccccatctctctctctgggtgcatctctctgtctctctctgtctctgtccctctctgtctctgagctctctgtcatctctctctgcctctgtctcctaacgccccatcaccacgcccccctgggctggggtttaaccagttgttttgatttctctaagctgcgccggccgcctcgggagccgcctcgggcctcgcacccccaccaccagccccttcatccctcacccaggcccccccatccccacctccccttaacacaatctgcacaatcggaatgaaaattgattttttttttaaatttcatatcttctccggggctctgtctaaagaggagagagacgcggcctaagacccttctgccaccgccgcccccgcatgcacacaccatgccccaaagcacacgcacgcacgcacacacacaccctgactgcacccacccatggccacacgttcaggcacaatctggggacatatctctccttacgccacacgcccatgtaggacacatctgtgcacacagtagagacccacagtgacacccactagtaggcacacacacaccatgcacagccccagccatgggacggctgccagccccacccatctgttgccacacaaacgagcccccaacaccctgtcccatctgggtgcacgaagccagctccccgcggtcacacactgtgtgtgtgtgtgctcacacacctgtccgtccagactatagccacgtccatgtgtacacagagcaggctcaggggccggccctcgacaggcaccaggagaccctgtgcctgtcttggagaggagggggttcaggggtgatgtggggtttcctgcatgggcatgcccccccatcccggacgccacccccattcccacactgcccacatcaaatgctctggcctgaccctggttgggggtgcctttgtgcctggggtgtacacataccccacatgtatacgccacatatacaccacacataccacatatacacaccacaaacacaccatacatacacacccccaccacacacatacccaccacatacaccacagacacacctagccccacacaccacatacacacacacggtacacaccacatacaccatacacacaccataccacacacaccacacatacaccacatacacataccatatcacacacaccacacacatatcacacacacacataaatacaccacacatgcaccacctacacaccacacacgcaccacgcacaccacacacacatcacacacacaccacacacatcacacacacaccatacactcaccatacacacacacatcactaaccctcacatacaccacacacagtacatacactacccatcacagacaaaccacacacaccacatcactaaccctcacatacaccacacacagtacatacactacccatcacagacacaccacacacaccacatatccgccacacaccacacacaccacgtacacaccacacaccaccccacacatacacacaccacatatacatctaccacacacataccacacactgcatacacaccatacacacacaccacatcactctcacatacgccacacatgctacactacccatcagacacaccacacaccacatatccacacacaccacatacactacccattacacacatacaccacacacacatgcacaccacatacactactcaccatacacacatgcacaccacacaccacacacacacacaccgcatatacaccacacacatcacatacacaccatgccacagacactatacatcacaccacatacacaacactgcatacacacacccacacacattacaccacaccacatgccacacataacacacataccacacacatcacccacataccacacaccacactcacacaccactcgcagcttactactctcaataccacaccttgtaatccccacatggacacacacaaaaccagtcatccttaacacacagacccacagaaaacacacagaagcacacagggtgacaccagaaacagcttcacacacagacttcggcacaagttcacagaagttgcagacacatgcgccatccaacagccacacataaacatgcaaccacacaaacatacacaatcaaacatacacaaacagtcatcagtgctctttagggctggacacacagtatcactcaattgttatgaaccaacactcaagctggtacattcagctcctacaaattaccacccacgtgtgcacgtgcacgcgtacacacacacacacacacacacacgtccacatctgaacccagactcagacacaagcccacaagctcagagacacaacagcaacccccgaacaccaacacagcgccacacaaacacacagctggtctgtgacacacaagattttgggggctcttcctcagctgcgtccttcacacccacactcaccagcccagctgccggggtcctctcagggtcgcactcacttggtccttccaccctgtttctctgggactgagcctcctcatcttgccctcagagataactgccccaggtccctgaggcctaccctgcacagccacaccatgtgaaaacaccagacatggcacaactccagagctttggacggtcacaccagacgcagctgagcaccacacacgtcacacagacatgacacgctcacagacatgatacgcccagacgtgacgaactcacagacatgacacgcccacagacgtgacacacccagacatgacgaactcacagacatgacgcgctcacagacatgatacgctcacagacatgacacacccagatgtgacacactcacagacatgacacgctcacagacatacactcacagacatgacacgctcacacatgcgctcacagacatgacacgcccagacatgatgcactcagacatgacacgctcacagacatgcgctcacagacatgacatgcccagacgtgacactcagacgtgacgtgctcagacgtgaggcacagacatgacatgctcacagacatgataacgctcacagacatgcgctcacagacatgacatgcccagacgtgacacactcagacgtgatgcactcagacgtgacgcacagacatgacatgttcacagacatgacatgcccagatgtgacacactcacagacatgacacactcacagacatgacacgctcacagacatgacacgcccagacatgatgaactcacagacgtgacacacagacatgacgcactcagacatgacacgctcacagacatgatgcactcacagacaggacacgcccagatgttacgcactcacagacgtgatgcactcacagacaggacatgtgtggctccactcagcacccatacttagtcacctgtgcccaggagcacgcatgtctacacagatcacattcacagacactgtgacacaagtcacacagtcatgtgcacatgcgcacacacacactcggtcttctgcctcgactgcactgtgcaggacacacagagggacagaatggcagacagggcagtggattcccaggctggggaaggtgtgtctgctaccctcgcttgagaggtggggaggctccaggccagagacagagaggcctgtgggtggggcaggggtggagacccacacccccctccctctgtctctccctctctgtctctgtctctgcctccggccctgtgtgtgtgtctctgcatctctgtctctctccctgagtctcagtctccgcacgatgtccctggggctgcggacagcagcgctccgaatggtgtcagttgaggggtggcgagggagcgtccccggggaggtgggagccgcagtgccacgcaccccgcctaccaaacagctctgggggaggggagagggagggtggaggcgccaccgtgaggcgaggcggagggaggtctggctgctccccaacctcactcgtggaccccgcctcccctcagagacccagagagatggaggaactggaggttggggtggggggcacagagaaggggagacatgcagggaggaagagagaccgagggggtggagcgtgatacatggagaactgagaggaagcaggagtgagacacggagggagatggagggggataggcgggacatggggaaccccaccaggggaaggcacagagaaggaaagagacacagaggacaaggacaggtcccacagaaacaggaagcagactgggagccacatgcacacgcagagagaagagagagacagagacagagagacaggcagggggagatccgaggtggggaaacacggcagaaggagcgaaccagagaggctgagacaaaagtagattagaaagctggaggtcacgggagagcgagggccgcaccggagaccctgggttgggaggaaggagagaagagggcagagatgcggaaaattgagggattagggcagaggcaggagagggatgcaggcgagcccggccctggaggtggagtggaaggctcaggtgtaggccgggtggcgggcagacctaaggtgtggattcctcgtcctccgccccacctcgcccttcttcagtcctaggaggttggtgtcccctgggagtccgacccatcccagcttcaaagcccaccctacccctcctcctcctcatctccaccaggccccaccccacccagaccccagctccatcctctacctctcctcctggtcctcatccccaactcccaccccttccccacccttgccttcattctacctccacccccagcctcactccacatcgggccccacccctctatcagagtgacagaaggcagggaaatgactgttatttggtgatgctggaggggcgggggcagagagctgaagcggggtgtggtgtacaccagaaccagctactcagggagcccagagacccagagtccttctagacggcaaccaccaagggccagggctcaggcatcccgacagagcccggggcttggcaccaagagtgtactgaggaaattatgttgaggtggaatccagattaaactgtgctcagcagggaatcagggagacagagatagcagatcaaagggacagaaagcaggagatcaagggacagaaatgaggagggcaaagagacagggtcagagggctggggaaatagggatggagccgagagctagaggggcagatggatgggactgagatgcgggagcacacagggacagggaatcggatgacaaggaattgaggccaaaaatggggagaagtgggtgatccagggttagagaaaaggaggaacagagaaatggggtcaaagacccaggagggcaaacatgaggggcagagaactgggaaccggagagagactccgagggacgagggaccagaggcagtggggcaggcctgagggctagggcaaggggcggggcctgggtgggctgaggctggagctgggtgccgggccaccagggatcccacaagggccggggtccagccgggctgggggggactcagggctccaggggcatcaggcgcggtgctaattcagcgccatcgatcagatgggatgagagcaataaattattgtgacaagatgcaatcctggcccgcgcactgccgccgaggcggatcgatccctgtccccagccccacaccgggtcccatgcccaggcctgggctggaggggatgcctctgcccacctctccctccattctccaccctgcacacactcactcccactgacagccaggtgaagggaatgtgaggggcagcctagggaagaggcgggagggggctgggggaacccacagagggaagttcagcgccccctctgacccaggccttttgcttccctcagcaccccatcctcaccaccacctgtgaggtaggaactgccatgatggatgcccatttcacagatgtggaaactgaggttctgacaggaaaagtaacttggccaaagtcccacagggatgaggtgagcctggacttgaatgcaggtcagtatgactctaggcccccgatatttgtactgtcagaggacagagcaagggccagagacagaaaaggaggaaagagacaagacaaggagacagacacagagtccaggatatggagaaactgagagagagtcagagagctgtaaagaccctgtatggagaaaaacagacacagacaaagacaaccagagaaatacagagaacaaagagagactgggagacagacagacagagacaaaaagacagggtgagacagaggagtcgagaggccagaaaccaagagagacagagagactcagaattaagacaggcagacatggacagggacaaggagacaggggcaggtggtggcaaaggtggaaatggagaaaggaaatgaaagtgagggtgggtggaaaggaaaggccagcatgcagggaggggcggtgtgggaggcaggagtgtgtctggggaggcaggggtgtgctgggagggggctgtgctgggggggtgtctggggaggcggaggtgtgctgggacggggctgtgctgggggtgtgtctggggaggtgggggtggatctggggaggcgggggtgtgttgggagggagctgtgctgggggggtgtctggggaggcaggggtgtgctgggagggggctgtgctggggggtggtaggggtgcgctgggaggggctgtgctgggggtgtgtgtggggaggtaggggtatgctgggagggggctgtgctggggggaggtaggggtgcgctgggagggggctgtgctgggggtgtgtctggggaggtgggggtgctctgggagggggctgtgctggccccaaacagcttgtgggggaggtgggggtgagcatgtggaatgacagccttagccccaggagtcaatgaagggtgagaaagtgagcctggagagtaggggagatggggttgggaggtaatggagaagcaagtgtcaccaaagtccctaggtggataggtgtgtctgtggagggaggaggtcacctgaggggcagatgagggaggtaaggacacctggatggctaggagggcagtctctgaagtcagacagccttgacttgactcaaatctctaacatctacctgtttctgggacctcaaagaaactctctggactcagtttccttctctgtaaaatggggacaagaggcaagtacgtgcctcatgagggtcctgtgaggacaaatgagacaatgggtgtgaagaacttggtgtctgtcacagagatggatggtggtcttagtaatcgggagctgtcatcaccatcaccctcacctttatcctcattctcgttgtcgccatcagtatatatggggagggtaggtgttatgtggtggaacaggtggggcacacattacaagcacctgctactcagagaatgatacctggaccaggtgtttctgatgcacattgaagtcagataacctcggacttaagatgctgtgcagtgcggggagcaggtgtgggggtggctgggaacaggcgacacatgtgtctaacacatgctacaggtgttatgcacgtggaggaaggcgctcctcgaggagagagctggtcagagacacgtgctaggaaaggggaccggtgtttctggagagaagcaggttggagacaggtgtgagagatctgaaggtttcttcctaaaggtgtggtggtgacaagctgcagggacaggtatcaaaagtgaacatagcagagaatggggcagaggtgtgcagtgggttcccaatgcttgcaaaaggtgcaaagggactccggtcacatggatgtttggggggaggaaaaggagagaggtggctggagtgtggggaaccaggtgcatgtctgtgggacagggctgttttcaggaggtgacccctagacccagctgaagagatgtgaagcaaagagagattaagtgggggtatgcatagtgggtgtcgaagcctcggtatctgtttgctgattaaatgatttgaatgtgttaccagggcagaggattccctgggataaacaggtgaggaatggcaggtgcagggggttactggtgtgaccttgtgcagcaagagagagagagaaacatgggaaattaggtatgtgggaaagaagagaagtggatagagagtacctgagggacaggtgtgggaaaacaggtatacaggtgacgcagatacctgtggccaaggacagactcctgccccaaacgtgtgtgtgtaaagtaatgttgtgtatagtgagagacagtgagagaccaggagaggcaaagacagtgcaagaaggagtgagacacaggtgagcaagtgtacaagggaccgggaaactctgaggggacaagagcttggaggaaggcataatggcagggaaagccatgaggagggtactagtgtgtggattggtgatcaggtggtgcttggggttaggacacaggtggggaaggtgcttctgttgtctgtgatgagtaacccgaaatgacaagtaggaaagacaggtacgggggaatccttggaagtcagtgtaccttggaagtcaggtacaggtagagagggatgtgagcgacaggtgtgctcttaggtgacctgtgtgtggccagctcttctggaagggcaggtgttggggtggttaaggaggtgcaacactgtcacggaggaggatgggtgagggccaggaggctggggactggtgggggcaggccttacctgaggggacaggttagcaggttgcatgtgtgagtgcttgtgtgcaacagaaggaatgtgtgtgtgagtgtgtgcatgtgtggtgactcggtactgcttgagaggaggaagaggtgaagaaatacgaatgtgtgaggaacaggtgagtttgcagctttaggggacaggtgggatggctcacgtacaggtaggaaggggccagtgtgacatgaaatgagataaaatgcagggattccagtggaaggggcagattttagagaacaggtattacctggaggggcaggtaagaggggacgtatgctccccgagagaccagacatcttaagggcaggtgtgagggggacaagtgttacctggaggggcaggtgagaggaaataggtgttacctccagggcagatgaagggaacaggtatggaggacaggtgttgcgtgcaggcaggtatgaggagatagatgttacctggaagtccagatttggggagttgaagggggaacatggatgtgacaggtgcattgatagacaggtgtgaaaggttagttacctgaggccacaggtgggtgcagtgtgactctgccagatggtctgccacctcgatttctctcgctcccctgtcctcccctccctggggagccagttctggctctcgggtccctcccgtggctctggccctgggtggggcacagagttagctctgggctaggcgaggcctggcctgctggcctgccgggcagccagggcccctgaggctgcttggcgatgcggagcgcgtctgggccgcggcggccggccgggaggggggagcgggcgggggggccgtttagccgtgatagatccgcgcgccgcttgtctcttaatctccagagcgaccgatcgattcgctatttccctttgttgccagaaaattcgatcctgggcctggaattaggtccccggcttaatctgagcggaaaccagcgagggggagacagagacagagatgctgggagagacagagacagagagacagtaagagacagaaagaggcagagagagagagatagaaagagatgccgagaaaggaagagagagagatagatgccgagaaaggaagagacacagggagagataagcacagagatttagagagagatagtcttaagagttggacccaaaaaggaagagagagatgctgtgagagacagagatagagagacagatcctgggagagttagaggtggacacagagatgctgtgagagacagagacagagagacagtgaggagagacccagccaggggagagataacagaagtggcccagcagggccctgcgacagtggtggaatgatagaaagggtgtcccagagggccccggccccacgaaggtcagggccaggcctgtactccttgccccgaagtgtgcagaccccagaattggcccaaatgtccttcccacagaccctgtgacccctcataccaaatatccagaccccagatatccagatccaaattcgcagacccttagctttgaactccaactccaaatccagacttctggccccctcaagtccaaactcctatgctgatccccagtcccagatatccacacccccagtcctgactcccagccccagtcagctcccaacctcagatatctagatcttccgccccaagtgtccagtctcttggctttgagcccctaggtcccaaatatgcaagccctcagccctgacctctaaaccccactcagaatctagccccaaatatccagactcctcagccccaaacatccaaatccaccttcaggtcggccaccaacccccgttcccagattttcagtccagtctcttgcagaccccatctccgtggctctcactcgctctccctccccgcccccaaatctcgcacccctgtcccgaggccgcacctctagcgctacccgcctcccaccttcccagagttgggcgctgccccacctgccccttacagccggggcggatgaccccatccgcctacccctccaccggctcggaggcccagcttctcaggcctcccgggaccacccccgcgcccgccccctcctggggcgggaatccccgccccctccccgcccctgcgccggccgcggcgctcactcactttctgggcttttcgcatccgctccggtccggggagaagtgtttaaagttcggatcccgcagccatggcccccgcggcgtcctggggagggggcaccggggcgaggggcggggtggggggagatgcccggagccccggggaggcagagacccagaggacgaggagagggagtctctgagacgccgggacaggagagactcagagacggagagacagccaaggagacagagacggggagacgagcagagacggggagatgcagagagggagagagacagcgagatagacgcgcaaagagagcagagacggggagagctgaggacggagctccgggctggagctcagcacagcgagcgcgggcgggcgcgcgccggggacagcctggccggctgggggcgcggggcggccctgcctcctgcgccttctcctcttcctcctcttcctcctgctcctcctcctcctcgttctcctcctcctccctccactcctctgcgcgccgcgcgcctcccgccctcgcggccgcccggccgggctcggctcgcagatatatggaggcggcggcggcggcgcgggggagggggcgggggcgcgatcgatggaatataattttcctcaaactcggaaaataaagttcagagctgatcaaatttgaaaacagatgtcgaatcgcgactctaaataaggttcgatcccgggactgagggagtgggggtggggcgggggtgggtggagaggtggagagacccccctcctctccccttcccttctcctccgccccgctcctccctaagtggacgcgcggacaaacggacaggcgcgaggtggaggtggcgacgatgcgtccaggacccctgctggacacgcaagcctggaccgggactggaacacggacccgcacacacgcagcctggataggagatacacggacagagggacatatggatacagtaagacagtgcaaacacacactcagggacacacaaccctacagagagacagacacagacacacacacacagacctgccatctatacacgcagcacacacatgcggaccgtaatacaggaagtggaaacacaaccggtacacggagacattcaggcacacacagagaaacatatgcacaaacacagcctgcacaccacaccttccccaacccacagccactccctgatccactgacccacaaactggacacaaagacaaccagatgcacacacagccacactccactcccaacacacagcctggacacacaagccctcactaacacataggcagaacccagggctggcacactgacactccccttcacactcccacaaggtcacaggcacacacacgcacacctacagtgacaggaaagggccctgcccagccagatctgctcccattgaaataacaagtcaatatcgaccagcctcagggcgggtcagacccacagttcagctcccggccggccggacctcctggcccaacctgaccctcaccctcactgtctaccctcctattccctcccttgccccttgcccctcgccccttgcccctcaccctgccctctctcccgcttccactccccaacccaccacccccgacttttctctcccattcccaggtcaggctccgccccgccaagtcccacaccaccttctctggggaaaggcagctctcacctgggcagcccctggaggcttctacccctagaggggaaaataggtctcacggcaagacagcagtccccaggtggatattcaggggccaggacagctctgtcggatctcaccaaccccaccagcgcccaggtgctgagaccgaggtgctgagaggctagaagagaacttcagccctgcctgacagagaaggttcagcctcactcccgctcaccactcactcaggcaagtcgctaaacatccccgagcctcaagtttcctcatctgcaaaatgggacaataatgacctccctcctagagtggttgggaaggttaaaccgcagggcgcatggagcacagctggtactgcaccaagtaccaagtaaacacgcatttgctgtgagcttgctgcttccgaataatctcattaaaaatattaagaattttgccagataacaagaattccttcacttgtctgtaccttcacttgtctgaaagggaacattctttcaaggagccaacaggcttcactgggctccatttacgaccctttcccccagagccatggttctctgggtgtccataacagccccgggactgtccacagcctacttgaacacaggtcaccagctacagtgtttgtgcatatgtttctgtgcgtgtgcctgaatgtctccatgtacgggtcgtgtgttcccacttcctgtattacggtatgcacgtgtgtgctgcgtgtgtagatggcaggtctgtgtatgtgtatctgtgtctatctctgagtttatctgtaacacccagcacactacagagagcattccccctctacacccagcacactacagagccccctcttggctctgaaagccaaggaggaggttccggaacaccctctggaaggcaggactcctcccacacaggacaccctttgggagaaaggtgacaccctctgggtagatatgactccttggctacacccttcaagagagctgggacaccattaaggcttcaagtacaccaactggaatgcatttcatgaccattaaacccctgtgaagagggacagaacaccttctaagcagaaagagctcaattgactgtagataacacccttcagtaagataggacatcctctggagagatacagtttatcacaccatacacgacaccctactggaaaatagaacatctttggaatgtgagggacagacacccttaagatagcaaagaccatcagtcaatagggctttaagactttatctctaaaccacgcccctctgggagacaggaaaacgtccccaggtgtcagaaacacctggactgtaatgttaacacctttgagggtcttgcaatgcccaatcagagggtggggaggaccccccaaggagagctctgatgctcttggggctggggttgggggggccaggacccattgccttgtgcatcccacacaccggtaggaatgggaacagcacccgtctgactgtttagaacaccctcagcaccccccacccccagaagacaccgtcttgatttctggaacacctctgggggctgtgcattttggagtaatttatgctccctctctgagtcctagggttcgggaggatttgtgaaaaggagaccagagcgtgcagcgctgtgtaaggcacatagtaggtgctcagtgaaagagacccctcactgcacagcacgcccgcggccggcaggggcacacgttccctcgttagcagtgttgccaactctgcctacttggctgaaggaagcgtctcacaggagggggatcgttaagctgtacttaacatccccagggaggctgcagcagcagaagactgtagttaataccccactgagagaggacgccctcagggtgtttaatgccccctaggagagagggagacagagagagggagcaggagaataccctcaccagcctctaacacccagtggactgaatttattacccgtgaaggagagagcatacctctggggtctgtaatatcctctagactcttgaaacccccaagagcaagaggacccctccgtgagggctatcggctctctcgagattgcttttaacaaagatgcctcctggtgcagctgaaaccactaaaggtgacagagggtgaaaccaggagccccccaccccaagattccatctccttaactctctccccaccactgcagccctcctggaaccacaggaacaaaagggaaggtgggggtggtgtgggtaggggaggttgaatggggcccaaatcccagcatgtcaatagtcatgacaaggaccatttaatgggatgtgcctggcagtggcctaaactctatacacagattaactcaagcaagtctcacggcacaactctaagaggtagatgctgttataagcgtcacccccacttttactgatgaggaaactgaggcacagaatcacttgccggctgtcacacagctagttagtattggaaggggacctggagccaagcagcctggccgaggggtctgtgttcttaaccaccaggccaccctgccctccccgctgcccccatattagactaggagcttgcgcagacaagcgccctgcctgcacggctctgcgtcctcccagagcagggcccaccctaccactgtgtcctctggctcagtatgaccgcccaccatccccgatccctcggggcttgaggctccctgtgggcagggcctgtgcctgattcatctctgggtccctgctgagggcaaagcctagcccacagggcctggggaggaggcagggagggagggagaggggaggagggaggcagggagaggacgttaaagagagcagggagggaggtgaggagaaagcaggcagagaggggctggggagaaggacggggagtccccggggagccgggcctggagctgggccaagccacactgctgtggatgttggggagagcagagggaatgggggagtccagtcagctgggagaggggtgcaaacaaacagcatggccacccctccctcaccccacccctatcccgggtgggagaagatggaccgagatgggcctggaaggtgaaggatgaaggcccgggacgaacaagatgcaaggagggcagacagacacaggacagatgggagccaggagagcacggggaggcagccagccagggtgtgtgcctgggggcgggaattcagacagacagacaagggtgagggaaaggatgggcgagggtgttggaagactggagacagatgtgggggctggtccaggaaaaggacagacaaacttagggcttggggctggggcaggagggacagacagacagaaggggagagtggccaggaaggaggggaggatggacacagggcgtctgcagaattggtgggcagatggacggagggacgggccgtgcagtgcagccggcggggccagggccaggccgagggcgcgaggtggcagccggcccggggaggcggaggctgagcgagcggtggtgtttgtggagctgtcggctgcggtggaattatgaaaaatagcaggcatcggagccggccttcagcttcgattaggggagatgggacatgacaggtgcgatcaatacgcagccgttctataaagtgtcaagtaatgaatcaatttcgactaaattttccatttttcagaggccgttctccgagagaagaatatcctcttttgtaaagatattattatcgatttcggcggcaatttgacatcaggggtagttaattccactcagaataaaattgaaaacacttgagagagaaaagagagaggcgaagagtgagacagagagggaaagagggggagggagggaggggctgggagagagagatggatggacagagagacagagacagggagacaggaacagacagtgagagagacgagagagagaagagagatgcagagatgcagagacatgaagagaaacttggagactgcaaagcctagagttatagagagacacagggacattcagagagactcagagagcagagacaccctaagaaagggcgacagagagacaaattgagagtggctcagagagaaaatcccagatgttactaactggctacagagaagcaaagaaatggacaaagacaattcagagaaaaagacagatggaggactgggcagcagaaactgatgacacagacagacagacagacacacagaagtgagaggctgagaaacaggaacttagggaactggggagaggggctgaagggtgtgcggagcatgagcaacagagaaaagcgagcctggcagaggagaggccagagaggcagagtggaggggtggggggcagagggtaggagaggggccaagaggctgagaacctgccaggaagtggggaggaaggggcaagggtgccaggagaagggcagaggctgagggtttggggctgagggccaatctggagatgagagtttggggagatcctcctgtcctatctacgctgtccccaaagtcagttgccctgaatgggcagaagctcagcgtgtgtgtgtgtgtgtgtgtgtgtgtgtgtgtccctgagatctggtgtgcatgtgtgttggctggtgtctgtgtgtccttgcatgttgactgaatcccatatcccattagacgtttgtgtttcctggacacacacacaatctgtttgtgtccctgtccgtgtgcctgcacatgctgtgggtccctggtctcccagtcccttgggtctcagctgcaggcaatggtgacaacatttctggttagtgcctgtcagtccccagctgaaatctccatttatccctgagcaggtcacaggctgcctgggaggaagagagaggaggcgggtagaggataggacccctgggttctgagagagatgacccaggacctgtactcctgggtctgagggaggatggtctcagatcctgggctcctgggtctgagggaggaggggctggggattggacccactgggtctgagggaggaggagctgggagcctgactcctgggtctgagacaggagggcctgggggcctggactcctgggtctgagggaggagggcctggggacctggactcctgggtctgaggaaggaggctgctgggggccgggactcctgggtgtgagggaggaggggctgggggcctagactcctgggtctgagggaggagggactgggggcctggactgctgggtctgagagaggaggggctgggagcctggattcctgggtctgagggaggagggagtggggctgggacaccccatggacaggatagtcagcagacaagtaagtaacagggctggctgggaagcccccgagccatcaccagcctcccctccagaaaagcctgtgcctgctgccccctagtggacatggagattaggccagaccagggacagggaactgacaggtcaaggagggaagccagaggcgctgacccaagtgggagcagagacaggggagagggagagagagaggagggaagagagaaggaggagatgggtggacagacaggcggacacagacagggacaaagatgaatagagaagtgggctggggtcaggccgacaggattgaggactcgaccttggtggagaagaaagagagaccggggagtgagttcagggctagaactggagatggacagggaaagatggaggacacagggggtctgcagcagacggcaggcagagggtgagggtgacagagagactcttggacagacagaggctgggctggtgagacctgggtacagacagtacaagagacaggacaggagccatatggacagatggacagtgacagagggatgggagctaggtctaaaggagggagaaaacccagagaacaggcagcgaagaggacaggtggacagggacaagggcaggcactcatggagagacagacggacatcggagggaaccgcagacacacccagaagaaagaggtggacagagagagagaaagagagacaggtggtcacacacagagagacagacggatgcggagaaatcagggctccccaagccaagtggacacccggagatgaagcagagagcggtatgtggggggagcccggagcccggcggggattccaggctgaggggctccctgtggcaaagcctaggagagttgctggggaacagtctcccctggccggggtctctgcccgccaccccctcccaggctccccccccacccggcgggctgcccggcggaggcgacagattgagcgatgagacgcattacgcacttaatccgcctgattgaatgttttgctttcgcccaaattgaaacattaaacaacacgggacgagaagaggcggccgcaaatcactcatgaaagattcatcttctcccaggcagccgccaccgcccgcctccaaggctgcccgccccagccgggaagcctcagggtgggggtgggggtggggcagcacccctgctcactctggggagccccagccctagtggtctggggaagttcttcccactgtctcgcctcaatcctacaggtggtctcagagactagaaccctggatccctcggccttccctggacagcatgaccttagccctgtccctgtccctctctggctggggaatccttgccctctctggggtccatctctccagttaccttcctggaccagcctggacctttgggacatggaaggggctgctcagagttgggggatgaggtctgggagcctcctccccgtgcagtggggctttctgggttcttgatccaagagtgggggtggtgtctgggggctgagtcagagggaggtggccgctgtgtcaggatcagtgcaaatgggcagacagggagtgtgttccctgccacttgggagctcagtgtgtctctgtgtctgcctgcatatatgactgtgtatcttctgtctcgctctgcccatgttggtgtaacttgctttgcgattgtccctgtgtcactacactcaggtctcggtgaccctgcgtgtgacggtaactctgtgggcttgtgggtatgtctgtctgcctgtctggcactttctgtatgtgcgtcctgtgggcagcatttttgtgtggtgtgtgtctgtatcagtgtgacttttggggtgtggctgtgtgtgactccctgtgtgtaagtctgtggatgactgtgtgccgtgtctgtctgtctgtctgtgtgttgcctgctctgggtctgtctgcaggtctgtgttgaactatttctgtgtctgggtctcttttctgcatccgcatgtccctgtgtctctttcagcctctgtctctgtctctgcctgagggggcacctgctggggccactagaggaaggcctgggtgcggagaagctggggagagaggaggcaagaaagacggagagacaggacagcggtgacgcctgagaaccagggagcagggagcaagcgcgagggagctgggggggccgttgtgggcgccacggccggagtgggtgatcaatattcgatttaggttttaattccggggcttttggagcctgtcagccctgatgtatgagctcacactggggccgcccagccagccaccccaccagtgcccatggcctggtggcctgtcctgggctccctggccctgccggcggtggactataggagaggggggaaggggagaggggcccagtgaacttgagcttggtcccttgcccacccagtgcacctatggcccctgctcctgcctggcctgccaagcaaggggcccctagaggtcctcaaacacctggtcgggtcccacagcctgcctgtctgcatggacctcatgttcagacacacacatagctctgggctcatatatgcctgtgcccatgcaaactctaacacatacaccccgggttcaaacacacatgtgcacacacaagccaccatgcatctcctctgacatacatgtgtgtccacatacaaactctgacacacatacgtggtccacacacataaccccaacgcatagacacataaaagcaccacatgaaccggaggtgggaaccctggggacacagcattctggcaagagaggcaagagacggagacacagaaactcagacgggctaacagtgagagatgagagagacggaccagtgaagagctcagagaagagcttgagagtggggacagacgcggagagcccccgaggggaggttggaggccacagggcagagcagtggacagggctcagcagtgagggggatgggagcccccccaaaccctgtctctttctcaggaagatggatccaccgccctccctgatgacaatgctgtctgcgcaaactttaattaacactttgagttaattagttcgagatcatttaggagtaaaatgtttttattagggaggctgcgagcctgttgatggatggggcgcgattcgctcttccgcctgcggggacagccggtaaacagaaatcaatcaggggcctcccaacccagcccccccagagccaagctcccagcctagagcccaggagtggaggctcccagcctcctccttcccccaggccccagatttcaggccccagcccctcctccctcagacccaggagtctaaaaccccagcttcctcttcccccaagacctacgagtccaggctcccagcccctcctccattaggctcacgaatccaagcccccagcagtctcttccctcagacccaggagtccaggcacccctgcagcctcctccctcagacccaggagtccaggcccccagcagcctcctccctcagtctcatgagcccaggccccagcctctcctccctcagacccaggagtccatgcccccagcctctcctccctcagacccaggagtccaggcccccagcccctcctccctcagacccaggagtccaggcccccagcccctcctccctcagacccaggagtccaggcccccagcccctcctccctcagacccaggagtccaggccccccagcccttccttcctcagacccaggagtccaggccccccagaccttcctctcccagacccaggagtccaggcccccagcagcctcctccctcagacccaggagtccaggcccccagcagcctcctccctcagtctcatgagtccaggccccagcctctcctccctcagacccaggagtccaggcccccagcagcctcctccctcagtctcatgagtccaggccccagcctctcctccctcagacccaggagtccaggccccaagccctcctccctcagacccaggagtccaggcccccagcccctcctccctcagacccaggagtccaggccccagcctctcctccctcagacccaggagtccaggcccccagcccctcctccctcagacccaggagtccaggccccccgcgtctcctccctcagacccaggagtccaggcccccagcccctcctccctcagacccaggagtccaggcccccagcccctcctccctcagacccaggagtccaggcccccagcccctcctccctcagacccaggagtccaggcccccagcccttccttcctcagacccaggagtccaggccccccagaccttcctctcccagacccaggagtccaggcacccctgcagcctcctccctcagacccaggagtccaggcccccagcagcctcctccctcagacccaggagtccaggcccccagcagcctcctccctcagtctcatgagtccaggccccagcctctcctccctcagactcaggagtccaggcccccagtagcctcctccctcagtctcatgagtccaggccccagcctctcctccctcagacccaggagtccaggccccaagccctcctccctcagacccaggagtccaggcccccagcccctcctccctcagacccactagtccaggccccagcctctcctccctcagacccaggagtccaggcccccagcccctcctccctcagacccaggagtccaggcccccagcccctcctccctcagacccaggagtccaggcccccagcccctcctccctcagacccgagtccaggcccccagcccctcctccctcagacccaggagtccaggcccccaggccctccttcctcagacccaggagtccaggcccccagcccctcctccctcagacccaggagtccaggccaccccagtttcctccttcagacccatgagtccaggtccctgcctctcctggtcccagcttggtcgggagtccacttctgtcgcaggacccggcttccgggcccccacctctaacctccctcggatgcctgaaaaccctgcctggtcctccgggcagccgcccccctctcccacccgcgccggcctcttggacacagcactagggtcggattcacagttgggagctccctcggctgcgggtcagaccctcccctccactccctctcgaggaccctgactccgcggccccggaactgtcttctcgccgcccctcggcgtctctgcgcgcctgtctcatcgggtctcggccgagagacgtctcgggcgtccccttcccccgcggtgacggcttcatcaggtgtccgcgcgggcgggggcagggcgaggcctggcgggcgcggggagcccgggggcggaggggcgggggttccggggccgataaatcttcatcaggcggcggcgggggggccattaggcgctaatgggaagatggaggggcctgtcggccgcgcgggccgggcctcatttgtcctgcttcccgctccattggccgctgcccccgccccgcccctcccccgccgccgcgcgccccatttccgcttcaaacctttggaggggacgtgggggggatcccgggggctgctgaaaaagaggcgactggaaggcagggacagattcaggaaaggggagggggctcagggcatggaggggaagggggttcggtcgcagagccagtttagaacgtgggtggctcagctagaacgcaggcggagtgggcaggagaacgtggcggggagggcttggaacgcggagaacgtgaatagaagtccccgaaggaaaagagaaagcgggagggggccgtcggggacgcgagaggggacttggaagatgggagtggcggggactggaacaaggcgggagtgggtgcaggattggaattaggggagggggtcggatcgccggccccagcctccaagggcggggatccgggaaggcgagggggcggcgtcccccgaggcagaaagcgcggaccccgcctgtcgccgccgccgccgcccgctcccggactcgcgccccccgcgcgtccactctgatttctcggcccatttttcttcctctcctgtcactccggcgctcgccctcccgccgccggctgccccgccgcgctccgcttcccgcgggaacccccgctgcagccagccccgggggctcagccggctccgcgcagcagcgcccccacccccaccacgcctggccccgatcagtccccaccaggaccacctatttccccaagtcggtcacccacaaatggactgcctccccgaacacccccaggagaggccccgccttggggggtagcactggggttggctcccccagcccctgggactagatccctaggacctcaggaccctagactgagattcccccaaaggaggcatctagatacccacaaaccaggccttcgaacccctaccctccctctgaagccctcacatggactgaagacccctgggatcagacctagacatgggcctggatcaccccaggcggagcgaatggctaccccgactcacaaacagaaggtgataacccagcctagctccagacagcccaaaatgaggattctggggcccagctccattcacccccaaacaagtcctccagcccaagacactcagagaataagggaaatggaccttagctcagtcaccccaaaataagcatcagtaaccacaagccccccccaaactaggcatgtattccccatactgtcacccccaaattagacgttggggccccaaatttggcacacctaaactagactttcctcattaaacctcatcaggaccccaagatacaccacccacgatctacaaaagtaggccccagctgctatcacccactcagcatgtgaccccattctcaacacatacaaactagaaaatgggactgaaattcaaacacccttaaactgggcaaccccaaatgtgacaactggatcctcagactcaagtcaaaatgaggatctgggcctcacccaccctaaggctcccccaaactagacatctggctctccagactcagtttccactaaaccaaggaacctccgaaatgccccagcaagtcaccttaacactagtcatgtaggtctctacgtagcatcacccctaaaccttgcatccagacccaatcattggtcaccctaacctatgcatgtggacaaccaacttttttttttttttttttgagacggagtctccctgtcgcccaggctggagtgcagtggtgcgatctcagctcactgcaagctccacctcctgggttcacgccattgtcctgcctcagcctcctgagcagctgggactacaggtgcccaccaccacgcctggctatttatttatttatatatttatttttgagacagagtcttgctctgtcacccaggctggagtgcagtggtgtgatctcggctcactgcaagctccgcctcccgggttcatgccattctcctgcctcagcctcccgaatagctgggactacaggcgcccaccaccacacctggctaatttttttgtatttttagtagagacggggtttcaccgtgttagccaggatggtctccatctcctgacctcgtgatccacccgcctcggcctcccaaagtgctgggattacaggcatgagccaccgcacctggcctttttttttttttttttttttttttaaagacagggtcttgctctcttgcccaggctggagctggagtggcatgatctcggcttactatagcctcgacctcccaggctcaagtgatcctcctgcctcagcctcccaagtaactgggacaacaggtatgagccaccactcctggtcgaccagcagctttagaagccccccaacttggcacctggaattccagcatcacctgcccttacaatacacatctgagctttcacccccactcataagagttagagacccctctaagttaccccacgaactcagcatctagcctcccaacctcagacacccccaaagttaggaggactctgtggcactgaagctcagatctccaaactaccccttttgtccccaaacttcagtcaccctacactaagcaccccataggctgttacccccagaagtaggcaagtcaagaacccccaaatcaggtatgtgcagctgaccctcaaggtcagtcttcctaatccaaacaccaagaagctcataatcagagagacctgaacttgggatttagagtacctgcctcaaacaccctcatagcaggttggatggtggccccccaaaaaggtatgtccacatcctaaccccagaacctgctaatgtgaccttacaggaagagtctattcagatgcaattaaatgaaggatcttgagatgggattatcctgagttgctggggtgggccctcaatccatgttaagggacctggtaacagacaagaagaggccggacgcggtggtttacacctgtaatcccagcactttgggaggccgaggcaggaggatcccttgagcccaggagttggaggccagcctgagtagcataccgagacctcacctctacaaaaataaaattagctaggcatggtggtgcacggcttagtcccagctactcgggaggctgaagcgggaggatcgcttgagtttgggagatcaaggctgcagtgagctgtgatgataccactgcactccagtctgggtgacagtgagacctcttcacaaaaaaaaaaaaaggtgggggggccgggcacagtggctcacacctgtaatcccagcactttgggaggccgaggcatgcggatcacaaggtcaggagatcgagaccatcctggttaacagggtgaaaccctgtctctactaaaaatacaagaaaaaaaaaattagccgggcgtggtggcaggcgcctgtagtcccagctacttggaaggttgaggcaggagaatggtgtgaacccgggaggcggagcttgctgtgagctgagatcgcgccactgcactccagcctgggcgacagagcaagcaagactgtctaaaaaaaaaaaatccgattgaagccactcctaattcaggcattgagcctcccagaggatctgagtctctgtgtcagtcacccctaactaggtatctgggtgattagcctcagacattcccacactaaggaacaacaccccgggccgggcacggtggctcacgcctgtaatcccggcactttgggaggccaggtgggcggatcacctgaggtcaggagttcaagaccagcctggccaacatggtgaaaccctgtctctactaaaaatacaaaaattagttgggcattatggtgggcgcctgtaatcccagctactcaggaggctgaggcatgagaatggtttgaaccaggaggcggaggttgcagtgagccgagatcacaccactgcactccaccctgggtgacagagcaagactctgtctcaaaaaaaaaaaaaaaaaaggaacaacaccccaaactccatcaccccaaactaggtacaaataaccacaaaccctggcaactaggtcttgagactcagtgagccccaaattgtatataaatgttaggaactcataactagtagccctcaaaccagacatctggttgccttctcttaatctcccaaagatgggcttctcatacacgagagtgacacccccaggaggcatctgatgacacaaccccagcttggcactggatctgctgagggacatctgggccccagctgtcaccccagattgatgttcgggctctcagatggtcatcccaacctcaacatctgggcagctgggattacacactcctaaactagacatctgaatgttttgccacaactacccacaatctaaggcattttggatttgagccccaaacttgggctctgaaccacgcccccagcctcagaactccctaactgaacatcatggtaagtcacttctattttggatttagggtcccagccttaatttgttcccagattagaatataggcccacaggctgggcgcagtggctcacgcctgtaatcctagcactttgggaggccaaggcaggtggaatgcccaagctcaagagtttgagaccagcctgggcaacacagtgaaaccctgtctctactaaaatacaaaaaaattagctgggcatagcagcgtgcgcctgtagtcccagctacttgggaggctgaggcaggagaattgtttgaacccaagtcccagctacttgggaggcagaggttgcagtgagccaagatcacgccactgcactccagcctgggtgacagagcgagactccatttccacaaaaaaaaaagaatacaggcccacagtttcactcacccctaaattaaccttcagggcctcaaggtcagcaaaaccacagcaagtcactctcaaaataggcatctgagctccacagccacccacccacacactttgcatatagcctcccagtctcagatgtccccaaaactagggcctggggcacccaggctcagtgacccccagactaagcaagtgagctccaaacttcagtcagccctaaggtaatcagtaggacccccaaatcaacatgtgggctgccaacctcggtcaccgctaaacctcaaaaccagtcaccctagacttgacacctgagtctccgaactgactcaccccaaacatgacaggtgaaatgccacaggaagtcacttctaatctagacagtaggcccccactgtcgtcactaatgtgggtgtcagtagcccccatccccggcctcagtgacgaagccacacaactgcagacatctagagctgggtgttgggtgtcccaaaacaggaacaagggctcacacgtgcccagaactgggcaggaggaactccaggcaccccaaattcaggatcttgagccccagcatccatcttctcaaagtgagaatctgagtcctcagtgttagtcacccataaacaatgcatcttgactaccacaaccaaccatttgcccccaaactagggttttttttttttgagatagggtcttgctctgtcacccaggctggagtgcaatcatggtgcaatcatggctcgctgcagcctcaaactcctgggctcaagaggtcctccctcagcctcctgaatagctgggactgcaggcagttgccactgtgcccagctaatttttttgttttttgttgtagagatggggtctcactatgttgcccaggctactcttgaactcctgccctcaagggatcctcccaccttggcgggactagctgggactacagcccagctagtttatttttatttattttattttattttttttggagatggagtctcgctctgttgcccagagcaagtggcgcaatgttggttcactgcaacctccacctcccaggttcaagcgaatctcctgcctcagcctcccaagtagctgggattataggcgcacaccacaccccagctaatttttgtatctttagtagagatggggtttcaccatgttggccaggctggtcttaaactcttgacctcaggcgatctacctgcctcagcctcccaaagtgctgggattacaagcgtgagccactgcacccggtccagactaggctttagacccacaggatcctcttgtgtccagtaaagggcagctgggtctccagggccagaaatcccaaggttacctgtgccccagccacagcgacccctaggccaggcattagagcctcagtctccatcttcccccaggggtctctatcactgccacccacaggtgtggaggtgctttgaaaacactggccctccatgtcatagacatgaagcactcctcaagtgggtcctgagtcctggggccctgacctcttgacacctccattccaaatacccagactcctagcttcagtgaccttcacacaaagctccacaccgctggccacactcactcagagaccccacacctgagtacaggaaacccttgactcagttgtcccaggaacattcaggcatcagcactctcaggctcagccatgtttagaagggaccagcaccctagactctgcgccccagactagaggactgaaatgacagctcctgccgccccaagtcaaaacaggcacccctcagcctcatccctccagctgcacaactatgccccaagtctctgtcccccaaactaggaagtctctgccacccagaactgggaaactgtatctccatctctgttaccccaaggccgggccttgacttctggtctcatcaccccaaactagaccactgatcccagtctctgcctcccccaaatggacaactgaaccccaatcactgtcagctcaaactggacaaaaggaccccagtcactgtcaccccaaactagaaagcaagaccagtagtctctgtcaccccaaacatgacatggatgagtaatgtctggcacatcaagatagacaacaagacctaaactgtcaccagaaattggcaagtggatgagcccaggagttcgagatcagcctaggcaacatagtgggaccctgtctctatcaaaacaacacaaaacaaaataaattagctgggcatggtggcacgtcccaggaggcctaggtgggacttgagcccggggaggtcaaggccacagtgagccatgattgcgctacctcactcctgcttgggcaacagagtaagaccctgtctcaaaaataaaatgaaataaaataggccgggtgtggtggcttaagcctgtaatctcagcactttgggaggccgaggggggcaggtcacttgaggtcagaagttttagaccagccagatcaacatggtgaaacctcatctctgctaaaagtacaaaattagccgggcgttgtggcaggtgcctgtaattccagctacttgagaagctgaggcaggagaatcgcttgaacccaggaggtggaggttgcagtgacccaggatcgcaccactgcactccagcctgggcgatagaatgagactctgtctaaaaaaataaaataaggccaggcacggtggctcacacctgtaatcccagcactttgggaggccaaggcaggcggatcatgaggtcagaagattgactccatcctggccaacatggtgaaaccccatctctactaaaaatacaaaaaattagccaggcatggtggcgcatgcctgtagtcccagctactcaggaagctgaggcaggagaattgcttgaacccaggaggcagaggttgcagtgagccgagatcgtgccactgcactccagcctggtgacagaacgagactccatctcaaaaaaataaataaataaaaattaaattaaattaaattagcaagctagtctgtcacctcacaaatgtactgggacaatgatctctgtataacaacctacacaaccagaccccatttctgttacccaaaatacatgcaggggccccagtccgtttcccaaaagcagacaaccagatacccagtctctgtcacccatatatactctgggacccatctctgtcctgtaaaactagacaacctagccctagtttctttgccccaaatactgcttggcacccccagtttctgtcactcaacactagacaaccagaccccagtctctgtcaccccaaatatacccagggatcctaacctctgtcccacaaaactaggcaactggacctccagagtctatgaggtcacatgttccctggtctctgttttctccccacaaaactataaaaccaaatgctccatctctgttaccctgaatacatcaccctgggacccagtctctgtctcacagccctagacaaccaacccccagacactgccaccccaaacgggacaattgtacttctaggcttctagggtctgtcacaccacgttgagcaacacgttgcataaaatgtgacctcagactagagacctgggcccacagtcccattcatcttcatctgctcgaccagactccatccagtgtgtctcctaaactagacggccagacccctggtcccactcatgccaaatgagacaagctaacttccattctatgtcaccctaaactagaccctggaacccctatcatttcatctcaccctggacaactgatccctaatatctgtcattacaaactaggcagctaacctcctagcccctgtcaccccaaattcaacttcccagtctctgtgccccaggctaggtcctgggatcccagtctttatcccacaaaattagaaaccagaaccccctgattctgccaccccaatctaggcaaagaaacccccacttctgtttcttttttttttttttttttcaagacaagagtctcattctttcacccaggctggagtgcagtggtgcgatcataactcactgcagcctggacctcctgtgctcatgtaatcctcccacctcagtttccccaagtagccgggactacaggcacgcgccaccaggcctggttgatttatttttattttttattgagacagggtcttgctgtttcccaggctaacccccacttctgttgtcccaaactggacatctggaaccccgatctccagcatcccatactatccaaccagatcccagtctgttaccccaactaggcaaccagacctataatggctgcagcctcaaactagccaactggtcaccccaggtcttccaccccaagccaaggccctgatccccccaactggtcaccccaggtcttccaccccaagccaaggcgctgatccccccaactggtcaccccaggtcttccaccccaagccaaggccctgacccccagggctttggtctttagccaaaattagttggccagtcttgtggcctctgtaaccccacccagataattggactggtagcctctggcaccaaagtgagataaccagacctccagtatcagataccacagtggagttcaccagatccccagttactgttgctctaaactggtcatcaaaccctcagtctggtaccccaaaccttaaatttcagtctcaacccagtgtcacctcaaaagagccaagactctacatccaatacccctaaggaggtgccagaagtcccagtcttcgccacgagaaactagacaatcagaacccagtctatcaccccaaaacagaccttagaatctcagcccccatcaccccaacctagacaagaacattagtctctgccacctccaacaactggttcctgtcacaccaaccagatgcaagtccctaatctgtcacttaaagagaactgggctgggcgtggtggctcacacctgtaatcccagcactttgggaggccgaggcgggcagatcatgaggtcaggagatcgagaccatcctggctaacacggtgaaaccccgtctctactaaaaataaaaaaaattagccgggcgtggtggtgggcgcctgtagtcccagctactcggggggctgaggcaggagaacagcatgaaaccaggaggtggaggttgcagtgagcggagatcgcgctactgcactccagcctgggcgacagagtgagactctgtttcaaaaaaaaaaaaaaaaaaattgagaactgaacccattttcttttttaaagacagggtctcccaggctggagcgcagcgtatgatcctagctcactgcagcatcaaactcttggattcaagtgatcctcctgtctcagcctcccaagcagctggaaccacaggcatgcaccaccatacccagctaattttttcttttttctttttttttttgtagagacgggacctcattttttgacccaagctgctttcaaactcctggcctcccaaacagatctccaattaccattaccccaaatcagaaactggatcccaggctatatcaccaaacaagaccaccagattcccaatctgtcacttccaaccagccagctggatcccagactgtcaccaaaatagacaagacctttggtctctgtccccttgatgagacagcaagccctccaatttctcctaccccaaaccaaacctcgaatctcaaggttgttcaggagagacagagaaatggtactgtagttttgtttttatttttatttatttatttattttttctcgagacagagtcttgctctttcgcccaggctggagtgcaatggcgcgaactcggatcactgcaacctccacctcctgggttcaagccattctcctgcctcagcctcccaagtagctgggattacaagcgtgcaccaccacacctggataatattttttttttttttttttaagtagagatgggtttcaccatgttggccaggctggtctcaaactcctaacctcgtgatccgcctgcctcaacctcccaacttgctgggattacaggcatgagccaccgcatctggcaggttttcatatttttgatggagtcttactatgttgcccaggctgatcttgaactcctgggctcaagcgtcttggccttccaaagtgctggaattacaggcatgaaccaccacctccggccctgggaccctagtcttgatcaccccagatggaagcttctggtctcagcatctcaataactcaacaccagaatttgagacctgtagccagttgccttcagaataggcctttggcctgagtaccaacctccccctgacccgcagctctagcctgctgcctcagtgatctcagaactgagtgcttgggtctttggcatcagtagcctccaagcaaagcacctcgatcatattcactgcaaacccagcgatgtagactggacctagcgtccactcaccaacatgggcacggacactcagtctcccctggggaatactggcattgaggtcaacaaacaccctctgctactccaaaattgggattggaaccctggcctctgagtaggcccaggtgacctgacttggccgggggcaccccgggtccccaccctgcctggtgccccaggatgagtccatctctaactgcctccctggcggaagcacttgtctgccctctggtggcagattctggaagtgcactcctgtgtggcgtcaagacacccaggctccccctggtcttcccatcttttgggaagcctgaagcctgggggtcttcctgcttccttccactcacctcccacgcaagtcagccaccaagacctgtccttcaacctcctgaatctctcttccctgtctcgcctctccaccccacttccctgccccatcttccccagctaggatcatcgtccctcgtctcactccctccagcccatccgccacacaacctcagagggataaccctctctgccccgccccgcccctcccctgtccccgttcccctcccctccccttcccctcccctccccttcccctctcctcccctcttttccttttatttttcccttcccttttccccttcctctcctttcctttcctctttcttttttttttttttagagggagcctccctctgttgcccagattgcagtgcagtggcgcgaccttggatcactgcaacctccgccccccaggttcaagcgattctcctgcctcagcctcccgagtagctgggattacaggtatgcaccaccatgctgggctaatttttgtatttttagtagagacagggtttcgccatgttgactaggctgatctcgaactcctgacctcaggtgatccactcacctcagcctcccaaagtgctaggattacaggcatgagccatcatgcccgggctaacttgcaattttctatttaatccgcacaccccccgcccccgccttctttttgagacagggtctcactctgtcacccaggctggagtgcagcggtgatgcaatctcggcccactgcagccttgacctactgggctcaagcaatcctcccacctctgcctcccaagtagctgggaccacaggcatgcgccaccacacctggctaatttttgtattttttgtagagacagggtgttgccatgttgcccaggctggtctcgaagttctgagctcatgcagtccacccaccttggcttcccaaagtgctgggattataggcatgagccaccacacccagcaactcttgtttgtttgtttttaaagagatggggtatctctgtgttgcccaggctgagtgcagtggcagtcatggctcactgtagcattgaactcctggactcaagttatcctcccacctcagcctcccaagtagctgggactacaggcccacactaccatgcccaaataactgtttaacttttttgcagagatgggggtcttgttgtgttatccaggctggtctcaaactcttgggctcatgcaatcctcccaccttggtttcccaaggtgttaggattatacaggcatgagccatggtgcccagccttaatcatgttttttttctttttttttttttttgagatcgagtctcgctctgtcacccaggctggagtgcagtggcgcgatattggctcactgcaagctccgcctcccaggttcacgccatcctcccgctgagtagctgggactacaggcgcctgccaccacgcctggctaatttttttgtatttttagtagagacggggtttcaccatgttagccagggtggtctcgatctcctgacctcgtgatccgcccacctcagcctcccaaagcgctgggattacaggcgtgagccactgcgcccggcctcttaatcgtgtttttaaaagtaaaaaacaaaaggtgaaatgaataataatttaatccactatatcaataaattatccttccaacacacataatcaacataaaaattattattatttttgagacagagtctttctctgttacccaggctggagtgcagtggcacaatcttggctcactgcaacctctgtgtcccaggttcaaacaattctcctgccttaacctcccaagtagctgggattataggcatgtgccaccatgccaatttttttttttttttttttgagatggagtcctgctctgttgcctaggctggggtgcagtggtgcgatcttggctcactgcaacctccgccccctgggttcaagcaattctctgcctcagcctcccaagtagctgggattacagtgcaccgccaccatgcccggccaatttttttgtatttttagtagagacggggtctcaccatcttggccaggctggtcttgaactcctgacctcgtgatccacctgcctcggcctcccaaagtgctgggattacaggcgtaagccaccgcgccaggccaatttttgtacttttagtagacacagggtttcaccatattggccaggctggtctaaaactcctggcctcaagtgatctgcctgcctcagcctcccaatagtgctgggattacaggtgtgagccaccatgcccagcctataaaaattattgagatattttactccattttcatactaaatcttcgaagtctggtgtgcatttcacactcatagcatgtctcagtttggaccagccatgtttgaggcagccgcatatggctggccaccatatctgacaggagaattccagaacagtgggcatcagtgggctctgggtgagcacctgctgcatcaaggatgagtgggtgagttctgctgaggagacacgaggttggagaggctgcatccctgaggccttggcactcgctgtccctctccttgggaaactccacccacttcttgtgtctcctcagagagccctcccagaccacccctatctaaagtaattggcggggcacggtggctcacacatgtaatcctagcactttgggaggccaagacaggtggatcacctgaggtcaggagttcgagaccagcctgggcaacacagtgaaaccctgtctctaccaaaaatacaaaaaaatcagccgggcgtggtggcaggcgcctgtaatcccagctactcgggaggctgaggcaggagaatcacttgaaaccgggaggtggaggttgcagtgagtcgagatcgcgccattgcactccagcatgggcaacaagagcgaaactccatctcaaaaaaattaaaaaataaaactaaaaatacaaaaattagtcaggcgtgttggtgggcacctataatcccagctacctgggaggctgaggcaggagaatagcttgaatcttggaagtggaggttacagtgagccgaaatcacaccattgctctccagcgtgggcgacagagagagactccatctcaaaaaaataaacaaataaataaaaataaaaaaatcaagtcacttcttaggccctctcggccacctcccttgtcttcatctgcctggcactttccctcccaagtgtgtttctcttttgttactgctaccacgtggcagtctccacctcatgatgaaaggcaaactggacccggcacggtggctcatgcctgtaatcccagaactttgagaggctgaggcaggaggattgcttcagcccaggagtttgaaaccaggccaggcaacatagtgagaccctgtctaatgaaaagttaaaaaaaattagctgggtgtggtggcgtgcacctgtggtcccagctgctcaggaggctgaggtgggaggctcacttgagcccaagaggtagatgctgcagtgagcagtggtcacaccactgcactccagcctgggccataaagtgagaccctgtctcaaaaaaacaaaaggcaagaagcaaactgggctggacacagtggctcacaccagtagtcccagcactatgggaggctgcagggggagaatcgcttgagcccaggaatttgagaccagcctgggaaacaaagcaaaatccatctcacaaaagcaaactgtgtctttcatctcaagcagagtaaaacccaaagccctcaccgtggcccacaaggctccctggcctcccacactgtccccctcgcttatctgccccagccacgcccacctcctggctgccctcgagcctcctggctgctgccatctcccaggctatgcccctgtggcttcctctgccccaattattcttcctccaaaggatctgggctgctccctctctcaatttaggtctttggtgaatgtcacgtcagggaggccttttctggtcaccctctttaacccacaactcattcccgaactttctctgtgcagaaaagagttaacctggcaggctccacaacagactgctgtccttagacaggcctgggtgcacagttggtccttggctgggaacttgggtgttggggggggggtcttatcacttcctgatagagtggctcgctgcatctatctaggctgttcgtgcaggcctagagtggcttgctgcatctatctaggctgttcgtgcaggcacaggccttctttctgggagcctggcattttggtatatgttggagagaaggtgctcttgtggccgcccccatgaaaccaagggcgctgaggctaggatcagagtgtccctggctgacatttcacacgtcaccatgatccactgctggaggaattaggtgtggcctctggaagtgcatgcctggtttcccgagttcactccatgcacctttccttttggctgacttggctccataccctttgatgagagtaaatcagagctgtgagtgcaattgcatactgagtccccagtcccagagaaccatcaaacctggggtgctctctgattcctgagtcctaaagaaccatcaaacctgggggtggtctcggggacccccggcacactgtccttctcaactcttttctcctcctgaacactcaccaccattgggcatcccataatattttacctgtttaccttgtcatcgtcttgcccacaccccaggttccaccccaaccctgctctgtgcagtattcccagctccacccatagagacccacagaagatgctgggggaatatttcctgaatgacacccataacagctttattttcaaaggcgggatccctccccgggcttgtgatgggacggcgctgtgggcccgagcagcagagccgtgcaggacaggcatgggcaggggtggggcagctggcccgggaggccggcaggtcccagaagacacctcacacgggttccatctgcagctcctccccgtccacagcctcaatctggtggaaggcagcgtgggagccgatgaccaccagggtggctcctgcaggaaagccggcagctcagggccacactcctgcacctggctcccaccatccaccccagctgctcagaccctgtactcacccagcacccagaagacggccgagcccgcaccagccagccagaagaaggggaaggagatgcctccagccagagcatactgatgcgctgggctcacctctcggcctgggggcagatggcattggggtgctgttccgactctccatgccctctcccagagtaacccctgctgccccccaacaatccgtacaagctccaggttctcgggatcgaatccaaactcctcatgccaaggccctccaggtcctggggtcaccctgttcccctgctgtccccactgccctccagaacacagcacaccgtcctcgcctgcctcagccccaccctctgccctctgccccacatcctccaggaagttcctgggatcccggcttcctgctccctagactagggctctcctgctgcaaccctcgcgcagaccagggtctcaaactggtggcccaagggccaaatctgacctgtggatgtgttttttgagctgttttgcaaggatgtgatttgtggctggcaaagtgaacgatttcacataaaaataccaacttcaggcttctcatagaagtctcagggatggggtctacatgctctggtgacggtgatcagctgaagccaagtcgtgcctgtgcttcaggcactccctccaccccagcccatcaagcacataacttgcaggcccctgaagagcctggccttcaggtctacctaactgtccaatcccaactccctgaccccactccaaaccttgattttcccctggggggaatttcccctggcattttgttttcccagtggtccttggtactactagtctgggaaccacatgaaacatactcctcggcttccctctctaagttccaagttctttctggtcacaccccagaaagcaggaaaagaaacgggaacagatctaggccagtgtaaggtggccacctggtgtccagtgtgggcacctgcagctgatgttggccgcagagagcggcaaggggaggagagagaggggaggagtcatgtggtttgaaaaggagtaggtttaaggcacagcagccaggtggatcctgggtttgaggaatagcaatttgagggggctgagactcgatggaaggatcggttgtgtctgagattttaagggatcaggtttgggggatctagtgtacatctaggcttgggcggacttgggttttgaaggacttggatttggggtctgaggtctgtctgcattccaaaagaccaagatttgagggaccaaggattcatctgggcagggggtttctcaccaaagagcacaagcttggactccaaggtgcgcagatagagaatgtaacaggcgccgaaaaagacagccagagccaccagcaacataggggacgtcaccctggaggaggagtgcagggaggcagcggttagacagctggggctgggccagcccgacggccctggccttctccaccggcgggcggcaagctacatcctggagaccagggagggccaggtgacatttagtcacactgcatcctggccagggtgatggtggggtaggggacctggccctttggtgacaaggtagtctagcagagccaatccttgggggcggggcctgggcggtgagaagagggccctgggcggtgagaggagggaccgggcggtgaagggcggggcctgagcggcgagaggaggggtccagccggtcggggctagtgcgggtgcggggcccgggaggcactcacacacagtacaggatgaggcccaggaacacgaacacatagttgctctggtagtactccacgttgcgtacgaggcgctggcacagctctcccaggttgcggggccgtgagaagcgctgctggtccacgaaggtgctccagggccggatggtcgcgcggcgccgctccagccactcccggcctgcaccggagggaatcagcttcggcagcagggtcctgcggggggtggggccgggtcagtggtggaccgggatggagccccagacccccgcaaaagaaggggactaagggtgcctggactccctcccgggaccccagattcctgtacagcaggcagggaggggactaggggcccagactccagggtcccattagaggagaccggggccaacacttctgcggctcggggctgggactccaggctctcgagggaggagggaggagggggccgggggcccggactcccgggtctctggtccgagggcctagagccagctcgctcacgtgccgctcagcccttccgcctcggcatctttctgctggtccttctgcgctgccatgtctgcgtcgtgaggggtagagctgctgtaaccagcccggtaccctgaagaccccgccggccccgcccgacgccggccccacccagcggagtcgacgtggcgcagccccggagcagctggggactgtagttctgccgccgagtattgtgggagttgtagtcctgacggtgactaagaggatgggcgctatgatggcggtctgactcgcaaaacaccttgggagatataatcccagaaagtgacggcgcgcgcctctgggtattataggagttgtagtttcaggagggtgcatgtgggctgtcaggagcgagggcgttatgggaactctaacggcagaagcgggcgttgtgtactctcccagggaaggcacaatggggaccgtgcagagctgtccttctgactctagagggcataaaaaaacacctggagggcttgctaaaacagattcctgggccctagcccagatgttttcattcagcaagtctggggtggagcccataatttccatttctgagttcccaggtgatgctgatgcccctggtccatggactacattttgagtagaaagatttagataatttgtgggaattgattccttcctcaagagattgaggctagtgagggggccatggttgctggaggggtatctgaggttgccccctgccccaccttgtggagtcccaaagatgaatgagttggggctagggacacctccgaccccgccacacacacctttggagagaagggagtgaagttgggaaagacaaaaggttgagaagttttgtgggcttttttgaaatggagtctcgctcttgttgcccaggctggagtgcaatggcgcaatctcggctcactgcaacctctgcctcctgggttcaagcgattctcctgcctcagcctccagagtagctgggattacaggcgcccgccaccacgcccagctaatttttgtatttttttagtagagacggggtttcaccatgttggccaggctggtctcgtactcctgacctcgtgatcttcctgtctcagcctctcaaagtgctgggattacaggcgtgagccattgtgcctggcccacagggctggaattctaattgaattctaatggggtgaaccagaacagggcctcaagaaatgtgtgtggaagtatagggaagcctgggctcccttaagcagactgggatcctaattttccaaagcagctgggtggggctggaaggaaaatatctatatgggataaccaggtgacctttttttttttgaaaatttttttaagtagataagggattttgctgtgttggcccagtaggtctcaaactcctggactcaagcgatccttctgcctggccttcccaagtattgggattacaggtgtgagccaccatgcccaggttcaagtgacttttttttttttttgagacggagtctcactctgtcgccagggctggagtgcagtggcacaatcttggctcactgcaacctccacctcctcctgggttcaagcgattctcctgcctcagcctcccgagtagctgggattacaggcgcccgccactatgcccagctaattttttgtatttttagtaaagatggggtttcaccatgttggccaggctggtctcgaactcctgactttgtgatttgcccgcctcggcctcccaaagtgctgggattacaggtgtgagccactgcgcctggccccaagtgactcttttaggcccagctcttgtcttccaagatctacagcagtttagggtttgtgctttgaggcctgctggaaggtgttcccaggaggtgggaggaagatggccctgtctgaggggctggtggcgcaataggcagggaagccctttgcaagggccccacactgaagatggaagagttacactttgaagatcagattggctagttactgtttatttcctctttgtcacccccaggcttttagtggaatcaggtttcctttttttttttttttttttttgagatggagtttcactctgttgctcaggctggagtacagtggcacaatgtctactcactgcaacctccgcctctcgggttcaagcgattctcctgcctcagcctcctgagtagctgggattacaggtgtgcaccaccatgcccagctaatttgtgtatttttaatagagacggggtttcaccatgttggtcaggctggtctcaaactctgacctcgtgatctgcccacctcagcctcccaaagtgctgggattacaggcgtgacccatcacacctggcctggaatcaggttttctaaataggattcaaacttgaaaatcaaaggaggactgcggggctgggcgtggtcctgtaatcccagcacttatgggaggctcaggagggtggatcacttgaggtcaggagttcaacaccagcctggccaacatggcaaaagcccatctctactaaaaaaaaaaatacacatgcctgtaatcccagctactcgggaggctgaggcaggagaatcacttgaacccaggaggcggaggttgcagtgagccaagagtgtgctatcgcactccagcctgggcgacagaatgagaccctgtctcagaaaaaaacaaaacaaaacaaaacagaaaacaccaaaggaggagtgcaatagcacaattagccccgagcaggaataggggagcagcatctgaattcaaagggccaaagcagcagaggtagcccttggaagaacctccaccgaaagacagagcttggggaatagaattgggacagagctccagctgcctctttggtggcaggccgtaggagattcaggatggacttttgttatgagagctgttgggtttccttataggaactgaatgaaagcaatttcattccaaaacccactggtctttgttctgagcagagaacatagaggcagaggcctggaggtgtcgaacagcgcaggccatggcaagagacggggagggggacagtggagtctgaggggcaaggacattgcaggaggggtcctaggagtgggagggtggggggggactttgaataagggaatttcaggagatgggacctggacacaggggtaatgtgggagaggagggcctgaggcagagacatcatgagatggtgagaaatggggtccctgagggaaggggcctttggcagatgggccctgaattaggggggtagggggttggtgtgctgggagatgagggggcacctgagaagattgtgagtcccaggccaggtgtggctcacgcctgtaatctcagcactttgggaggccaagatgggcggatcacttaaggccaggagttcgagaccagcctgcccaacatggtgaaaccccatctttactaaacatacaaaaaaaaattagctcggcgtgatggtgcacgcctgtaatcccagctactcaggaggctgagtcaagagaatcgcttgaacccaggaggcagaggttgcagtgagctgagactgtgccactgtacgagaccctatctcaaaaaaaaaaaaaaaaaaaagaaaaagatgggtgcctccagcctgaggactcctccctccctcctgggatccccaaggaagcggtgctgggaaagcaggaagaccttagcacattcagccagaaatgtgggtcactgtccctgctgtgtgacctcaaggaaagccctcccgtctctgggcctcagtctccccacctgtctatgggagcgtctcttcccctgcaccagaaaaattaaacagtatgtgtgggtttcctaggagaggtctgggctcatgtagcccctaccaggaccaggctgtactctggggtcaccaggggtgcccagcgcacatggcccctgccctccaactgcctttccccctcagattcgggagtttctccctcatccattgtcttgtgcagtgggtgtgtacatgcacttgcacactcacccactcacactcactctcagcatcctggccacagacactggcattgggaggcaggcaggcccaggcctggccccagcccctcctctgacttgcctccctgagctgtgttaggaaggctgcctcgagggaaatggattcactgccccaccaaggtggcaaaaatgaaaaggactgacaactcccagtggaggaaggatgtggagcagctgctgcttccttacactgttggatgcagaatggcactcgaactttggaaagggtctggcaacgtccatgaaagctaaacatggtctatcccatgaaccagcaattccactcccaggcacgcgtgtacccaacagagtgcacatctgtcattaaaagacacaactagagggctgggcgcggtggctcaggcctgtaatcccagcactttgggaggccgaggtgggcagatcacaaggtcaggagttcgagaccaacctgaccaacatggtgaaaccccgtctgtactaaaaacacaaaaattagctgggcgtggtggtgcacgcctgtagtcccagctactcgggaggctgaggcagaggaatcacttgaacccgggaggtggagattgcagtgagccaagatcgtgccagtgcactccagcctggtgacagagcgagactccgtcttaaaaaaaaaaaaaaaaaagaaaggccgggcgcggtggctcacgcctgtaatcccagcactttgggaggccgaggcgggtggatcacgaggtcaggagattgagaccatcctggctaacacggtgaaacctcgtctctactaaacatacaaaaaattagccgggcgtagcggcgggcgcctgtagtcccagctactcgggaggctgaggcaggagaatggtgtcaacccgggaggcggagcttgcagtgagccgagatcgcaccactgcattctagcctgggcgacagagcgagactccgtctcaaaaaaaaaaaaaaaaaaaaagacataactagagggctgggtgcagtggctcgtgcctgtaatctcagcactttaggaggctgaggtgggtggatcactttttttttgttgttgttgagatggagtttcactcttgttgcccaggctggagtgcaacggctcgatctcagctcactggaacctccgcctcccgggttcaagcaattctcctgccccagcctcccaagtagctgggattagaggagtgtgccaccatgcccggataattttgtatttttagtagagatgggggtttctccatgttggtcaggctggtctcgaactcccgacctcaggtgatctgcctgcctcagcctcccaaagtgctgggattataggcgtgagccaccgtgcctgttttttgtttttctttttagatggggtctcactctgtcacccaagctgaagtgcagtggcgtgacctcggctcactgcaacctccacctcccaggttccagtgattctcctgcctcagccctgtgagtagctgggattacaagcacatgccaccacgcccagctagtttttgtatttttagtagagacggcgtttcaccatgttggtgggcggatcacttgaggtcaggagtttgagaccagcctggccaacatggcaaaacccagtctctaataaaaatacaaaaactagccgggcatgttggcaggtgcctgtaatcccagctacttgggaggctgaggcaggagaatcgcttgaacccaggaggtgaaggttgcagtgagctgagatggtgccactgcactctaacctgggtgacaaagcaagactccatttcaaaaaaaaaaaaaaaaaaagacatgactaggatgttcctgtccctagcagcaccaattgtaatagccccaaactggaaacccctaagtcccccaacaggagaatagacaaattgtgttatagtcccacaatgggatgaaaaggaaggggccacagatgcaggtgacaatatggatgactcctatagacataatgctgagaacaaggagccagacacagagatcacatgctgtaagatttcatttgtatgaagctcaagaacaggcacaactgatgtgtggtaacagaaaccagatcagctcttgcctctggaggggaggcgactggaggggctccagtgaactttctgggtggagggaaaggttctatgccttgatgtgggtggtagctttgcagatgcaactttttttttttttttgagacgggttctcgctgttgcccaggctggagtgcagtggcatgatctcggattactgcaacctctgcctcccgggttcaagcaattctcctgcttcagcctcctgagtagctgggattacaggcatgcaccaccatgcccagctaagttttttgtttttttgtttttttgtttttgagacggagtctcgctttgtcacccaggctggagtgcagtagtgggatcttggctcactgcaagctccgcctcccaggttcatgccattctcctgcctcagcctcccaagtagctgggattacagatgagtgccgccacgccaggctaatttttttttaatttttagtggagacggggtttcaccatgttagccaggatagtctcgatctcctggccttgtgatctgcccgcctcggccttccaaagtgctgggattacaggtgtgagccactgcgcccagtttttttttttttttttttttgtatttttcgtagagatggggtttcgccatgttggccaggctggtctcgtactcctgacctcaagtgacccgcccgcctgggcctcccaaagtgctgggattacaggcgggagccaccgcgcttggcctgcagatgcaatttttaaaatcattgagctatacccttaagatgcgtgcacttcactgtatgaaagtttatctcaataaaaagagagaatagcgtagtgacctagaactttggacagccttggttcaaatcccagatttgtctcttcttagctgtgtgcaaatcacttcttctctctgtgcacatttaatgcacacttagaagtgggcagagcacatagcaggcactcagtgaatcactgtcatcaccatcatcatcgtcattgtgtcccctgggtcctactcctataggagaggctcccagtcaccatcccacgtctgcttccctccctctcccctgttctgattccacaatgccatcgcctggtgaattcaagctgctctgactttcgtggagttgaaaactccgtgattagatggctctgagattccgtgacttccaagccagtgccaggctaagttcctgcagtttcgagagtcgcctggcagcgcgccccaacagaggggatgctgtcccagccgcagtccccgtctggaaagcaggcacaacacacacaccgcttctctctccccactgatatatttgataattgtccagaaccagagatggcatcagccggggggctgaaggggagtaaaaaagagcccagggaggtggctggggcgggaggaatggatagaggggtgaggagagggagagaaactgacacagaaaagagagaggagagaggtttggggcaggggagagaagccagccagagtgggggcggcaggagatagtggagggggtgggggccaaggtggggccacaggaagagagggctcctccccccagaatacaaaattggggggactgacaggggcggtcctgggcctgggggacggggaagagatgggcgatgtggtggggctgaggtcagtagtaggtttccttctccacccaacctggagagacaaagaaggaaagaaagagacagagtaagagatggagagagacaggcaaggcgagccgcccagcagagagagggacagagagggagagagacaaggaaaccacacagacagagacccgtgagaagacagagtgggtgcccggagagatgggaagagagagaagagtgggaaccaggtggcagagccatccagcagggcgaggggagcctgggaccagctgcctgagaccctgctgccccccgcccccctcggctgccttgccgagctccctcaccccctgggttcctgcgcaggatgagtttgcggatttcgtcgtagacgaagatgaggaaactgtaggggaaggcacagaaccaccagctgggcctgcagaggggagagcaggagggcttgagtgcggggccctaacgagaggcagagtttcaggggactggaggggacgcagaggggcagtctcccaggatccttcgtgctcacaggtggagggtgccctgggcggggctggggcctggggtcttcggagtaatccgtggtgggagcagcctatgggggaggctcgggggcatcagaatggggactgcagtggggacaccaggggaggtggggcctgaggttcaggctgagtctaagggaaggctccatggcaggcgctggtgtgggcagggctgggggcagcggggcactcacttgagagggtacatgcgcagggccacgtccatgccggggcagtaggacaggaaggcagccagggccgtctcctcaaacagcccgaagatcaggatcttgttcctggaggcacagaagggcagggctgggcccagagagcacccaccctgcacctgccaccccgcagagacagggggaggcacagtgcagacacccagagacagcagcacagacacagagacagagaggcagagacatagggagagacagagatggggagacatgccccgacagagagagacaaagatagaggcagagcgatggtgacacagaaagagacaaaagacagggacagacacagagacagggacagacacagagacagacagggacagacagagagacagacacagggacagacacagagacagggacagaaacagacacagagacagggacagacacagagaggcactggtataaaaagaaaaggccaggggcacctccaccacacacacagaggctgagagagaatctaggacacacaggaccccttgagagaaaatcagtgcagtggcaaaacccaaaatgggctgggcatggtggctcacacctgtaatcctagcactctgggaggctgaggcaggaagattgcctgagctcaggagtttgagaccagcctgggcaacatggtgaaactctactaaaaatacgaaaaattagccgagcctggtggtgcgtacctgtaatcccagctacttgggaggctgaggcatgagaatcgcttgaacccgggaggcggaggttgcagtgagccaagattgtgccactgcactccagcctgggcaacagagcaagactctgtctctaaataaataaataaaaattagccatatatgatggtgcacacctgtagtctcagctactcaggaggctgaggtgggtgggtcacttgagcccaggaggtcgaggctgcagtgagctatgattacaccactgaactccagtctgggtgacagagtgagaccctgcctcaacaaaacaacaaaaaaccaaagcaaggacacaagaggaagtacacagacagacagacactcggacaggacagatggctgtccagtcaccatgtgcccccggccctcacttcatgccctgctggaagaccgagttcctccgggtcttgcagatgatcagatcggcccactggacgacaacgatgctcacaaagaaggccgtgtggcaggtgaactccaccaccttcctctgctcgtatgtctgcaggagcggtgaccagggcacgggacgtcagttagtggcactgcagccctagccgccaccccgacgttccggtgctctttgccccgccccatcctgcatggggtcctcagggcctcaggtgtgtcttccttctgcgggctcatagtcccgagggaggagtcaggagacgtacaaggaagaagaaaggttaatggtgatctcaccatccaccaggggccagggaggaggataaggaccctgtgggcctcccaaggaggacagacagcaactgggctttgaagggacagacagaggtggggaagaaggcctggcagggcagagagctccagcagtgggacacaaggctccagatgggctgggccaagggcatccaggaagccccaggtgcccagcaaaggccttgatgctgccatgggagactgagggggccatcgtaggaagtggccatgcatggctggaacagctcaccccggggatcttacggtgggcagagacacagcaccctgccctactcacccactgctgcccgtaactgtcttccaggtcattgacggtgcggtcatcccagttcagccggatgcccaccaggttgccgggcaagaagccattttctgccaggatcacaaagtaagagaagaagccaccgagagcctggatcattcctggaaggaggagagaggaagccgaggagaggctcagattggggccagcagccaacccagggcacctcagagggcccggaggcctccttggagaggggagtatgccctcctggccctgttatctggacattggttcccagagggtgacctgaggtctcacttggtggtgaggccctgagatgggtgggccacctgggacaggggctttggagagagggctctcccagagggataacctggagcccctctctcacctgacctaggccacctaaacatcatgaattcttgggggatccccagcttgagctccctacgcaggaatgacctccctgggcctggaaccactgccatgaagtctctgcttgctgggacagcccccaagggtggctgctccactcctctggggatccgcacacatcaacagcagagaggaggaggtggagaaggatggggtgcagaccccccccacagatagctcactggttggtcctgcccacgtctgctcccctgagtcaatgccagggtcccaagcacccacggtgggccaggcactgctctaggcccggcactgggtggtaaggagatggagtccccggtgcctcaccaatctgcccgtaggccatgctgatgagtctctcattgaccaatttgtccgtccgcgggttcctgggctgtctcttcatgatgtcgctttcggcagcctcgtacgccagtgagatggcagggacctaggcggaggaggccgggtgagccggagaggggaggactccaccctcctgggccccaagggtggctgccagggctcaccatgtcagtgcccagatcgatgcagaggatggtgatggtgcccaggggcagcgggatgttggccatgatgaacagcaggaagggcgtgatctccgggatattgctggtcagggtgtaggcaatggacttctttaggttgtcgaagatcaggcggcctgtggcacaggcaggctcagagcaggcgcccatgccagggagccccactccctctgcccctcctctgccctcatccaacgtcctttttttttttttttttttttttgagacagagtctcgctgtgttgcccaggctggagtgcagtggtgcgatctcggctcactgcaggctccgcctcccgggttcacgccattctcctgcctcagcctcccgagtagctggcactacaggcacctgccaccacgcccggctaatttttttgtatttttattagagacggggtttcactgtgttagcctgcatggtctcaatctcctgacctcgtgatctgccctcctcggcctcctgaagtgctgggattacaggcgtgagccaccgcgcccggcctgtccagcgtccttttctaccccccagcccacccaccattattttctttttgggacagggtctcactctgttgcccaggctgcagtgcagtggcatgatcacggctcactgcaacctcgactcccaggctcaagtgatcctcctgcctcagcctcccatgtagctgagactacagtcacgcgccaccacgtccagctaatttttgtatttttagtagagacagagtctcaccacttttcctaggcttgtctaatttctgggctgtgattccatctcagcctcccgaagtgctgggattacaggcataagtctccacacctggcccctcacccacctacctttccacataaacatccaaccacatcgcctttgtggaaacattcttgaaataaccactttggaagatggtttcggagttgctatcaaacatcccccaccccaccgaccgagtaatccgactcctaggttttatacccaaaagagaggaggactgtttatgcccagcgaaaagcaagtacgagaatgttcaccatagcaccactcatcagagccaaaagccagagtcaaccccatgtccatcaacaggtgagggatgaataaaccacggtacatccatgcagtcaaatactacacagcaagaaggggcgagctacggacacaactccacagctggaccttggatcccgtgctgagtgacacgagccagacacaaaagcattcttagcatccaactccaactggagcaggctcagcacccgtctctgggctaaaagtcaggataatggttatgtctaggaggagggatatagactggaagagagcagacaaaacctaaatggggggctggaatggttttctatcttgactggggtctggtggttgcatggctgtgtacatgtgtaaaaatttatacaccctgtctggttgaatattttaatgagatataatatgcccaactcactgtatgcatgccatatctcaataaatattcaaccagtacaggttgtctaaagtaaacaaaataaagattaatccaggccaggcgctggggctcacacctgtaatcccaacactttgggagaccgaagcaggaggattgcctgagatcaagagttcaagaccagcctggccaacatgatgaaaccccatctctactaaaaatacaaaaattagctgggcgtggtggtgggcacctgtaaccccagctacttgggaggctgaggcaggagaatcatttgaacctcagaggcagacgttgcagtgagccgcaattgtgccattgcactccagcctgggcaacagagcaagactccatctcaaaaaaataaaataaaataaaataaacattagtcaggcacggtggctcgagcctgtggtcgcagctacttgggaggctgaggtgggaggatcacttgaggaggtcgaggttgcagtgactgatgattgcagcactgcgctccagcctgggcaacagagtgagaccttgtctctaaataaataaataagtaaaaagattagcccatgaacaatgaggtcaatcattaagaaagaacaggcgggcacggtggcaaacacctgtaatcccagcactttgggaggctgaggcgggtggatcacgaggtcaggagatcgagactatcctggccaacatggtgaaaccccatctctactaaaacacaaaaaattagctgggagtggtggtgtgtgcctgtagttccagctatgtgggaagctgaggcagaagaatcgcttgaagctgggaggtggaggttgcagtgagccaacatcacgccactgcactccagcctggcaacagagcaagactccatcaaaaaaaggggaggggaggggagggggaaggaaggaaggaaggggaaggaaggaaggaaggaaggaaggaaggaaggaaggaaggaaggaaggaaggaaagaaggaaggaaggcaggcaggcagggacggagggagggaggaagggagggagggagggaagggaaggtgaagcaggctgcctgtggtgtggcttctttgattgctttgatgtctcttgcatagcaataagggcctgggccgctcccacctgatattctcgttccctgcattgtgctcttctccacaaactaggggtttctcatcctaaactatttatggatgaaatggtgacaaatgtgcatcagcataatccagtgtgtgttccaggtggtggggaagaaacaaggtgtgccgtgcgctgactgccgctgcaggtgggatggaggcgcaggggcccactgtgcctttgctttacttttgggtatatctggaatgcccccgttggaagttattttgtttgtttgtttgagacagggtctcggatctcgctctatcccaggctggagtgcagtggcaccatcatggttcatggcagcctcgaccacccaggctcaagtgatcctcctgcctcagccccccaagtctctgagactacaggtgtgcaacaccacgccctgctaatttttaaaattttttgatctttgaggtcttaatttgttgtacaggcaggtcttgaactcctgggctcaagcgatcctcccgccttggtctcccaaagtgctgggattacaggcgtgagcccccgtgcctggcccctgacggaagttaggtatttcttccctcacttcagagaggccttccctgtccaccccatctgggcaggaccctcactattatctatcacagcggcctgctttcttcggggcatatatcacaatttgtaattacatatctgttaacttgtttaaggctgtctctccagccctgtgagaacagggatggtgtctgctctgctcacagctgcctcccaggcttccagcatgatgcacaagattcggaaggagcagacggctgtatctgagacagtgtgtgtactgtgtatgcatagatgtcttggggaggccaggcgtggtggctcatgcctgtaatcccagcaaattgggaggccaaggtgggaggattgcttgagcccaggagttgaagacctcgctgggcgaggtggctcacccctgcaatcccagcactttgggaggccaaggtgcggggatcacttcaggtcaggagatcaagaccagcctggctaacatggtgaaaccccatctctactaaaaatacaaaaattagcctggtgtggtggcatgcacctgtaattctagctactcgggaggctgaagcaggagaattgcttgaacccaggaggtggaggctacagtaagccgagattgcatgcctgtactccagcctgggtgacagagcaagactctgtctcaaaaaaaaagaaagactagtctgggcaacatggcgaaaccccatctctacaaaatcttaaaaatcagccaggtgtgatggtgcatacctgtagtctcagctacttaggggcctgaggcaggaggatcgattaagtcccggaggtggaggctgcagttagccgtgattgtgccactgcactccatcctgggtgacagattgagactctatccccgcccccagcccccaaaaaaagatgtctcttgggagataagaaggtgttaaccatggtttcctctgggatataggagacaagggctgaggacatttaatctgttactctgggctcggctttgccgtttgaattctcttttaccatgaactactttttacaccagagacatttcaaataggagagagaaattggaagaaaatccaccaaggcatgaaccgtgattatttctggatggcgaggttacgggtgattctacttttttcctgaatgcttttctgcatttgtctatgattatcatgaattaatttgatgatcaaaataaatctgaatgtgaaccaacccttctgtggccttgtctgggcctgtcaggaggtggtgcctgtcggctcagcagcaccagcctcagacccagcccctcacaccgccttgcctgtgtaccggttcctctgcctgcgactccctggcactagtctatgtggacgtcacagcatggcccctgacttggctcagccatccctgtccactctgggaagctcccttgacccccagcccaggctggcagagggggtatcccccagggtccctggcttccccctggttgggcttgagaatttttttttttttttgagacggagtctcgctctgtcccccaggctggagtgctgtggcgcaatctcagctcactgcaacctccacctcctgggttcaagcaattctcctgcctcagcctcccgagtagctgggactacaggcaaccgccacaatgcccggctaattttttgtatttttagtagagacggggtttcaccatgttagccaggatggtctcgatcttctgacctcatgatctgcctgcttcagccttccaaagtgctgggattacaggcgtggctgccgcccctggctgagaatatctttaaaaagcctccaagtcagcttcacccaccagatggggcctgggctggatgacgcagggaccctgaagtgtgtcagctcagtcctgcccaggggagctcccgaccccacaggggaggaagacagaaaaggacaggctcaggctcctccagggccagggggcctgtggtctctgccacacatccccctgcagccctggccagttccccttgctggtctcaggcctccggtagtgaccctggtctccagggccacccctggccaactcaccctcctccacccctgtgacgatggaggcaaagttgtcgtccagcaggatcatgtcagctgcctgcttggagacgtcagagccagcgatgcccatggccaccccaatgtcggccttcttcagagcgggggagtcgttcacaccatccccggtcacagccacaattgcaccctggagggagagagggtaaggatgacacccagaggccagtccccagagtcccctccctcagatccagaagcccaggaccccagccccctcctccttcagacctagaagttcaggtccccaacctcctcttcccctcagacctaggagttcaggcctccagaccttcctccctcagacccaggggtccagacccccagaccctcctccctcagacccagaggtccaggcccccagcctccttctccctcagactcagcagtccaggcccccagaccctcctccctcagacccaggggtccaggcccccagcccctcctccctcagacccaagggtccaggcccccaccccctcctccctcagacccaggagttcaggcccctatcccctcttccctcatacccagaagtccaggccccctccctcagacccaagggtccaggtccccagccccctcctccctcagacccaggagtccaggcccccagaccctcctctctcagacccaggggtccagacccccagcccctcctccctcagacccaggaaaccaggccccggcctcagtgaggacccaggagtcaaggccccgtcccctcctctgcgggagcgcagcccacctgtctctgacagccctccacaatgatgagcttctgctggggggatgtgcgggcgaagacgatctcggtgtgattctgcaggatctcgtcgatttgctcggaggtgaagtccttgaggtcggtgccgtggatcacgcaggccttggcatccctgggaagagcagagagagcgatggctgaggtcagggtgtgtgaggagtggcaaagtgatccctgaaagacagagaaacagaggggccagccccacaaccaggagagccagaggaccaggggctgggggaagaggcctctgggagaagcaggggagaagggggctactgcagcagggcgtgcgggcagacctgaggaaggactttggggcagtggatttatttatttatttatttattatttatttatttatttttgagatggagtctcgctctgtcacccaagctggagtgcagtggcgcaatctcggctcactgcaacctttgcttcttgggttcaagtgattttcctgtctcagcctccctagtagataggattacaggtgcccaccaccacgcctggctaatttttttttaatttttagtgcagatggggttttgccatgttggccaggctgctctcgaactcctgacctcaagtgatccacccacctcggcctcccaaaatgctgggattacaggcgtgagccactgcgcccagccaagacacagtggattcagaggaacggagataaatggacaagctgaaggaaggcagagtcagagataggtatgaggatgggaaagttgaagaagtcagaaaaacagaacagaaaagagagacaatgacagacagacaggaaaaaagagagacagacacagaagtactggattctactgaatcctctgagataggaattattagtagcccattttagagatgggcaaactgaagttcatggatgctaaaggacttgcccaatgtcacacagcttgtgagcggtataagctggaatgcaggccgggcgcagtggctcacgcctgtaatcccagcactttgggaggccaaggcaggtggaccacctgaggtcaggagttcgagaccagcctggccaacatagtgaaacccccgtctctactaaaaatacaaaaaaaaaaaaaaaaaattagcggggcatggtggagggcccctgtaatcccagctactcaagaggctgaggcagataattgcttgaacccgggaggcggaggctgcagtgagctgaggttgccccactgcactccagcctgggcgacagagcaagactccatctcaaaaacataaataaataaataaaataaaataaaggctgggatgcaaacctatgcctggctacctctgtggctgcaatgtccccacaccggagggagggccagacccagggcctggtccatggaggagtcccagaaagaatgggacaggcagtgcagagggaggttggggggaagcggtccccctgtgtcaacaccctagagggatgtccagggccctggctgggatgggtggctcaccgggggttaacctggctgacgggaatgttgagccgggcggcgatgtcctccacagtctcgttgccctcagagatgatgcccacacccttggcaatggccttggccgtgatggggtgatcgccggtgaccatgatgacctgcaggcattgttttttagggatggcctctcccgccccacgcctggctttgcctcccccagccaccccaagccacaccttgatgcctgcgctgcgacacttgcccaccgcgtcagggacggctgcccggggtgggtcgatcatggacatgaggcccacaaagcagaggttgtccgtggtgaagttcacgtcatcacagtcgaaggcaaagcccttggggaactgctcctcgggcaggtaataatggcagaaacctagtggcagggaagggttggggtgtgagggtcccagcctcggaacctccgccccatgcccctagatgtctgcatcgcccgcattccatctccccatcagcaagacggccagtcagcattcatttcctaggataccttcccctctcatccatccattcattcattcattcattcatttacagtatattctgggaggccctgggctgagacaggctttgggcagcatcacaaccctccttgccctccagggaccccagagcccgcccggcagcctcgcaccaagcacgcgctcgcccaggccaccgagctcaaggtaggcattctggaaggcctccttcatttcctcgtccagaggctgctccttgccctgtagcaggatggtggagcagcggtccaggatgcgctcgggggcacccttcatcaccagcaggtatcggttgtcgttggggtcctcggtctcatggatggagagctggggaccgatcagagggtggcgtgcctgagccacgcagacaccaggaagctccctgccccatcctgtcccctgtccagagccacgggtgccaggataggcccacaccagggctcccccacactctctcacagagacctctgctcattcctgtccgctctgtctatgtcatggatatatatttctttttctttttctttttttcttttttcttttttttttgagacagagtctcgctctgttgcccaggctggagtgcagtggcacgatctcagctcactgcaacctccacctcctgggttcaagcaattctcctgcctcagcctccggagtagcttgggattacaggcaccaccaccacacccagctaacttttgtatttttagtagagacgggattttgccatgttggccaggctggtcttgaactcctggcctcaagtgatctgccctcatcggcctctcaaagtgctgggataacaggcataagccaccacgtctgtgctcccctcctcccaccctgttttttttttttaagacagggtctcactctgtcacccaggctggagaacagtggcgagatcacagctcactgcagccttgatctcccaggctcatgcgatcctcccgcttcggtctcccacgtagctgggaccacaggtccacaccaccatgcctggctaattttttatagagacatgctctccctatgttgcccacgctggtctccatctcctgagttcaagcgatcctcctgcctcggtctcccaaagtgctgggattacaggcgtgagccaccacacccagctgtatgcttccatttttatgaaatgtccagaataggcaaaaccatacggacagaaagtaggttagtggttgcttagggctgggagtgtcggggaggagggggcgggtgacagctgagagatgtggggtttctttttggaggtgatgaaaatgctctaaaattgactatgtggatggctgcctatatctgcgaatatactaaaactattaaattatacacttagagggacgagctatggtatgttaattatatcttaataaagttattttaaaagctctgagtcaactcctgtctctctttggctgagagccccctggaggcttgtgtgctcctcagagtcacagccaagtcctctccatgcccgtggggcctgacaggatctggccagcacccaccacccccaccacgctccctggctcccagcccctctgcactggctggctggctggtgttcagatgcgtcagcacactcccgcctctgggcctttgcacaggctgtgcctgctaccggagcgctcttcccccagacacctgcagggttccctccctcagcaccacaaccactacgattacctcctcatgcctttgttattgtctgtcttctagaaccagagcgtaagtctcagagaggggtgacttcaccatgtcactcactactgtgtgtacacccagcacccaaaacagggcctaacatgtggtggctggtcaaaaaatgtatactgaatgggccgggcatgatggcttatgcctgtaatcccagcactttgggaggccgaggtgggtggatcacttgaggtcaggagttcaagaccagcctggccaacatgatgaaaccccatcaatactaaaaatacaaaaactagctgggtgtggtggtgcacgcctctaattccagctactcgggaggctgagatatgagaatcacttgaacccagagacagaggttgcagtgagccaagatcacaccactgccttttagcctgggcgacagagcaagactccatctcaaaaaaaagtttactgaggccgggcgcggtggctcatgcctgtaatcccagcactttgggaggctgaggcgggcagatcacgaggtcaggagatcgagaccatcctggctaacacggtgaaaccccgtctctactaaaaatacaaaaaattagctgggcatggtggcgggcgcctgtagtcccagctattctggaggctgaggcaggagaatggtgtgaacccgggaggtggagcttgcagtgagctgagatcgcgccactgcactccagcctgggtgacagagcgaaactctgtctcaaaaaaaaaaaaagtttgctgaataatttaaagttgctgctctgccccaagaggtctcctgcttgttcccactctctgctgtaggaaaactttttttttttttttgagtcagggtcttgctctgtcacccaggctggagtacagtgcgtgatgtaggctctctgcagccccaacctccccggctcaggcaatcctcctgcctcagactcccaaatcgctgagaccacaggcacataccaccacacctggctaattaaaaaaaaaatttcgtacagatggggttttgccatcttgcccaggctcgtctcgaactcctggcctcaagtgatccccccacctcagcctcccaaagttctggtgttaaaggtgtgagccaccgcgcctggcctgcaggaagatctttactcctcagcgtctcactccaacagagatccggctcccactctcaagctctccctgttcctctccccaccaggcgggtattatcattcccattttacagacgggaaaatcaaggctctatgacacctctttacaggcgtcataaggaacctgaggtccaggctggctctcccggaaagcccagagtacctggtatttgttggtggaattgaagggaatctcagccactttcttgttgcgttcacgcatcagcttcacggagccagaggacagctcgatgcacttgagcagggcagactcagacgcatccccagccacatccctctgcaaggagaaagggttgtcagaacagggacagctgaggggaggacacaggcagggccgaggtgaggccagtagctgaacccaccttgagcacagggatgttgtcctgaccacccttgaagacagcgcgattgcagagcccagcgatgtgagacagggccacccaggtgtgcgaactcttgtcaaatgaggtccctgggggaggcatgtgtgagggccagggactcctggagccaggcccccatggtcctcacccggggcctgcgctcacctgactggtcctcagtggtgtcagcctcgtggatctggttgtcaaaccacatgtgggcgactgtcatgcggttctgagtgagggtccctgtcttatctgagcagatggtggacgtggagcccagggtttctacagcctccaggttcttcaccaggcagttcttccgggccatgcgcttggcggtcagcgtcagacacacctggaggacgagcaagggcaggcaagttacagggacaagcccggcagcagggttggatgagcgacacgagggccacagcccagctgcccagcccccagagaatcctgagggcctggaaaagaatgaggcagcacccagcaatgccacccccaattcagaccaatagaaacagggcagagacacccaaagacagggactagaatgctcatagcagccacatgcataatagtgcaaaacagccaggtgcagtggctcacgcctgtaatcccagcactttgggaggccgaggtaggcgcatcacttgagatcaggagttcgagaccagcctggctaacatggtgaaaccccatccctactaaaaatacagaaattagcagggcatgatggtacactcctgtcatcccagctacttgggaagctgaggcacgagaaccccttgaacccaggaggtggaggttgcagtgatccgaaatcgtgacactgcactccagcctgggcaacagagtgagactccaactcaaaaaaaaaaaaaattgtccaaaactgcaaactactcaaatgtccactaacagcagaaaagataaattgtggacaatggaatactaacattgataaaaacaaatacattactgctgcctgcacctgcatgggtgaacgtcaaaaacatgttcagccaaaaagagccagaaatgagttcatactgaattattccgttaataggaagtttgaacacaggcaaagttaatctatgctgttagcagccagatcaggggttacccttgggttggggggcaggggctaaataaggtcttgagggggcttcagggagacgcagtctcgttgcagctgacgtgattctgttcagtttgccccaaatcatcagactatgtgctcacaatatgcttaatcctttgcgtataaaaatccatttgacatagggtagcattcaacattgctaatatggaaaacagtaaactttttttttttttgagacacagtcttgctctgtcgtccaggctggagtgcagtggctcgatctcagctcactgcaacctccacctcccaggttcaagcaattcttgtgcctcagcctcccaagtagctgggattacaggcgcccaccatcacgcctggctaatttttgtatttttagtagagatggggttttgccatgttggccaggctggtcttgaactcctgacctcaagtgatccacccacctcggattcccaaagtgctgggattacaggcgtgagccaccctgcccggccctaatatggaaaacttcacataaaacattaagtcaaagaatgaaagaggagaatggtatttctaagatagtccctgccatgcaccttgaagacagcatttagtcaatatgctcacagctgtcaggcggaacctcacagagaatggacttctggggtgaagctggcagcaaagcagccagagaaaaaatttttaaaaataataataataattattattattataataattattattattattattttcttgagatggagtctccctctgtcacacaggctagagtgcagtggttcaatcatggcccactacagcctcaacctcccgggtcagcctcccaaatagctggaactacagacatgtaccaccacgcctggctaatttaaaaaaatttttttttttttttttttttttttgagacagaatctcgcttttgtcgcccaggctggagtgaggtggcacgatctcggctcactgcaagctctgcctcctaggctcaagctattctcctgtctcagcctcctgagtagctgggattccaggcacccatcaccacgcctggctaatttttatacttttagtagagatggggttttgccatgttggccagtctggtctcgaactcctgacctcaggtgatccacccgcctcggcctcccaaagtcttgggactacaggcatgagccactgcgcccagccttcacattttttggtagagatgggttcttactatgttgtccaggcttgtctcaaactcctgacctcaagcagtcctcctgcctcagcctcccaaactgttgggattaaaggcgtgagccactgcgccaggcttattattttattttatttatttatttatttatttttgagatggagtttcactcttgtcacccaggctggagtgcaatggcgtgatcttggctcactgcaacctccgcctcccaggttcaagcgattctcctgcctcagcctcctgagtagctgggattacaggcatgtgccaccacgccccactaattttgtattttcagtagagacagggtttcaccatgttggccaggctagtcttgaactcctgacctcagctgatctgcccgccttggccccccaaagtgctgggattacagcgtgagccagtgcacccagcctcattattttattttttaacttgatgtactcttcaacttttcatcatgagcgtgcacttcttaattttgcaataggattgttggctctttacggcttgccagtgtttctcaagatttttgtttgtttctttctttgattgtttgctttgttaatgaggccctctgagtcaggcccaagttgtctttcacaagaatactgtgatccaggcccccagccccttctccggacccaggggtccagatcccagcccctcctcccccagacacacgggtccaggcctctagcccctcctccctcagactcaggggtccaggatcccagcccctcctccctcagacccaggagcccagacccccaggccctccccacccagacccaggagcctggccttacagtgacagtggccagcagaccctctgggacattggccacgatgatgccgatgaggaagatgacagcctcaagccaggtgtatccgagaatgagggagaggatgaagaaggagacacccaggaagacagccacgccggtgatgagctggatgaagtgctcaatctcgatggcgatgggcgtcttgcccacctccagccctgatgccagggtggcgatacggcccatgacagtgcggtcgcccgtggccaccaccacgccccgagccgtgcctgcaggccagaggggttaggctgaggtggggtggctcagggaggttctggaggcctgaccccctgggacacatccctgtgtctgccccagctgtgtgtcttctctgcacccgcctcaccttccacacagttggtggaaaagaaggtgatgttccgagtctccaaggggttgtcgtgagtgcagtcgggagagcgagtctggggctcggattcgccagtcagggaggagttgtccacctgggggtaggtgcagcagagagagggttcagtccagggcctgggacaggagggtatttgtgtacagggcttggggctgaagcctgtgtgcctggagatcacagctagaagcctgggtgcccagtgggtgagtggtgtgtgggaggccagaggctgggatcttgaaggtggggaaggcacagtgctgctggccaaggtctagggtccctaaggatctccgaaaggtgagggctgggcctggactcctgactgttgggtgaggaggtggcccagggcctaaactcctgggtctgagggaggagggcctgggggcctggactcctgggtctgagggaggaggggttgggacctggactcctgagtgtgagggaggaggggctgggcctgagctcctgggcagcccgagggagggtaaagccgggccctaggcccaggcccaccttgcagccgtgggctgagatgatccgcaggtcagctggcactcggtctccacccttgatctccaccaggtccccgaccaccacctcctcagcgttcacctgcatcttctcaccttcccggatcaccagggcttgctgaggtgggatggagtaatgtcacctcccagactccctctgcctgggggtcactgggcccggcccccagcccatacactaacacccccgtctggccccttgctgggcacccttcacctggggcaccatgttcttgaaggactccatgatcttggagctcttggcctcctggtagtaggagaagcagccagtgatgatcaccacggccgccagcacgatgcccaggtacagctgtggggagatgtggggatgttgatcaggggccgcccaagccactctccaccagtccctgctcgcctggagtctgggaagggagctttgtgtcagtgggggtctgtatttgtgtgtctgaccctaggttggttatgagggttggtgtgtctgagtctcccctgtttgtgcttgagtccctctttctgtaatggttgtgtttgaatctaagggtctgtcgattttttttttgagacagagtctcactctgtcgcccaggctggagtgcaatggcatgatcttggctcactgcaatctccgcctcctggttcaagcgatcctcctgcctcagcctcctgagtagctgggactacaggtgcatgccaccacacctggctaattttgtgtatttttagtagagatggggcttcaccatgttggctaggatggtcttgatctcctgaccttgtgatctatcaccttggcctcccaaagtgctgggattacaggtgtgagccatctttcctggcatttttttttttttttttttttgagacagggtctcgctctgctgcctaggatggagtacagtggcacaatctcagttcactgtagcctcaacctcccagattcaagcaatcctccctcctcagcctccggagtagctaggactacaggtgtgcgccaccaggcccggctatgttttgtgtttttttagaggctgggtctgtctgggtatgttactcaggctactggaactcctggtctcaagttaccctcctgccttggcctcccaaggtgctgggatgacaggcgtgagccaccatgcccgacttgtccatctgttttgtgtgtgtgtctgtcctcctgcacatgttgagtctgggatgcggctgtctgtccatgtgtctgtctgactggctgcatgcctgactttacattctacaaggcagcttctttggttctctgtgtgtggatctctgtctctgtgtctccagctctgcctctctgtgagagcttatgtctaagactgtttagatttgaacatctgaggacactctctgtgcctgactctcatgtctctctgtcaccaggttatgcctgcattgctgtgtgtgtgtgtgcgtgtcagtgtgtgtgtgagtttctctgtcagtgtatatctgagtctgtgtctgtgtttctgaattaggtggccatgtttgaaaccacatcctggtgtggcatctgcgttgaccctccgtgcacatgcgtgtgtgtgcacacacgcctacccaggtgagcagctctgtgtggctggtgtgtggtctgtgttatgcgcatgggatctgaggctgcatctcgaatgtgtccctgtgttatggggatgggccctgatgtatcagcagcggggtgtgcctgggtctctatgtgacactcactctgggtatctgtcaagccatgaccacctgctggtgtctgttctcaaggccgctgaggtcacacagccttgggacagagccccggctcacacatcctgctgtggggccttggacaagtagcctggcttttctgagcctcagtttgccttgtatttgatctggttctcttgctgggtgattgtgagttagatgggaaaaagggggagagtgggctgtgaaaagcttagagggatgggaagaagttggggtgcggtgtccgtaaataaatgtgcagagccttgcacagggcagggtccaggcactcacgttgtcaccagaggggtcgtcctcggtgcccgcctggataccgtaggccaggaagcagaggatagccccgatccacagcaggatggagaagcccccgaagagctgccggcaaaacttgacccactctggggtggtaggcggtggcgtgagtgcgttaggcccatcccgggccaggatctcctgggctttgctgtgggtcaaaccctgagggacagaggactcacacagaaccctccctgggcaaccctggcaccccaggccttcaccagacccccagaacttaagacaccagccacagcccctcctccctcagacccaggggtcctagcccccagctcctcctccctagttcccagggtcccagcccacagcctggccacacctgcacacagtctgtgttgtatttccggcagacctcttccactgacatcttgtgctctgtctgaggaacaggagtttgggggagacggtgagtgcctaggccagccaagaactggcgaggttctctgggagggtgtgcgggcagagggcgaggcttaccatagccacctccttcttgaggtcatccaggtcccggcgctccttgcccttgttcttcttgggtgagtccttgtcatctttcttgtcctgcgaggtggcgatacgatagctgtcagagccaccagactgcgggcgagaaggggttccaggaggacaccggccctccatgccccagctatcctcctggccggtgcccctgcatctctgggtggggggtctctgtctgcctctcggggtctccctgtgtctcccggagcctctgggtgacttcacctcccttctgcctctggtgactctcaggcctcgtgagtctcatctgctgcaatcagcttccctgtctctggttctgtgtgtctctgagtctctgtccccgaaggtccctgtctggcttctgcctgtgtttcagtctctctctgtttctgtgcccatctttgcggggctctccccttttgtgttctgtgtctatgtgactttgttttcgttttttgaaacaatgtctcactctgatgcccaggctggagtgcagcaatcacagctcactgcagcctcgacttctgaggctcaggtgatcctcccgcctccgcctcctgtgtagctgggactacaggtgtgtgccaccacgcccggctaatttttaatttttttctagaaatggggtctcactacactgcccaggctggtctctaactcctggactcaagcgatcctcctgctttagcctcccaaactgttgggattataggaataagccaccgtgccccacctctatgtgacattttaactctgcttctgtctcttcttccctctccctggccctgtccaaccttcctacatatctgtcttttttttttttttttttttgagacggagtctcgcttagtcgcctaggctggagtgcagtggcatgatctcagctcactgcaagctccgcctcccaggttcacgccattctcctgcctcagcctcccgagtagctgggactacaggcgcccgccactacgcccggctcatttttttgtatttttagtagagacagggtttcactgtgttagccaggatggtcgcaatctcctgacctcgtgatccgcccgtctcggcctcccaaagtgctgggattacaggcgtgagccaccgtgcccggcctcgtatctgtcttttctatgtctccacgtgtatctccatctctttctcctctgtctgtctcccttgatgtgtatctccaggtctgtttttggctcttggtcttattgctttgtttcatcatctctctgtctcctgtctctttatctctccatctctgtatctctgtctttgcaaggctgtttctctctcttgatagctctctctctctctctatcgctctgatctctttatgttgtctctgtcattctctatcctgatcccagtctctgggtctctctgcatgtgtctttctatgattttgtctctctctgatctctggttctttgtctctctgccttgcatgatgtctgtctccatctcttggctgtgtctccccaggtctggctgagtttctgtctctctgggttcttatttccctctgagttggcgtctcaaggatcagtactttctgtctctgtctttttccgtctttcggtctgtctctctctgtcattgtgtctctatcttcatctctcaagctgtctcctctgggatgctcacatctctccctacctgtctcttttcctgtttcaacctctctctgtctctctctctgtctctctaatatctctctctgggatctgcctatctctgtctctctcccactctctctctctgggatctcctctctatctctgaatctctctttctctctcactatcactaagatctcctctctttctctttctctctctctctctccctctctctgtctctctcaaatcttccgtccccctccttccccatatatctctcattctctttctctctctccctctctctgtctctctcaaatcttccgtccccctccttccccatatatctctcattctctttctctctctccctctctctgtctctctcaaatcttccgtccccctccttccccatatatctctcattctctttctctctcttactacctcatcctggaattttcctctctgtctctctttctcccactgtctctctctgggctctcctcaatctctctctctctttctctctctctctgtccatatatatatatatatatatctgtctctttttgtaggatcttcctctctctttcgctgtctgtctctgggatcttcctctctctctctgtctctttctctcactttctctctgggatcttattctctatttctgtctctctgagatctcctctctctgtctctggaatctgcctctctatctctgtctatgtctctctgtctctgtctctctcactgtctccctctggtaccttcctctatctctgtctctgcctctctctgggatcttccatgtgttgggcccatggagcgtccttaacagaggctgggcatggccaggttcctggaggacagagcaggagagttagaggcagaagccctagtcctggcttgaactgcgcatggtgtgagtccctgaagttccagtttgggagcctgggcggatggggagggcagtgtccgaggctggtgggaggggtggggcgaggctgggtgctgcaggggccgctgacaggtcccgcaggcccagggccaagctgggatcggaggctcagcgcggctcagcgctaatctcctcgtgaccttgtagagggcctgagctgcctgctgtctgcccccagacccagaggctgagtcggagggtgggggtgtgcagggaggggcagcagcctggagatctgggagcctcaagaaggggtgcagggggtgggagggaggcttggccccacgccagccctgcagcagcactgcgtctcagatgcggaggcacagaggcttgggggacggggagaccatctttcctactgccctacagtgccggggtggtctcagctttgcccgatggggtagacccaggatggagagacatggagagatggagagatgtggagctacaaaggcctggggtcaagtcctgtgcaggaggccaggagaggggtgagatgggggtcaggagagagagagggagaaaatcagctgcccacccagaaaccttagttgaaggctgggagctgatgctcggggccccataaatgctaagggctgggccggactctcagatactgagagaggctggggtcctggatccctgggtctgagggaggaggggcaggggtctggacccctgggtctgagggaggaaggactgggagcctggaatcctgggtctgagggaggaggggccagggcctggactcctgggtctgagggaggaggggctggggctggacccttgggtctgagggaggaggggctgggcctggacccctgggtctgagggaggaggggctggggcctggattcctggtctgagggaagaggggctggggcctggactcctggatctgagggaggaggggctggggcctggactcctggatctgagggaggaggggctggggcctggactcctggtctgagggaggaggggctggggcctggactcctggtctgagggaagaggggctggggcctggactcctggatctgagggaggaggggctggggcctggactcctggtctgagggaggagggaccgggaccctgggactcctggctcaccctggccctggccttggctcctgcttgcccttgacacagccagacccccttggggagcaggctcccatctgttggagtgcacagctgaggctttcccagtcaaggcaggaggcccagatgggcgcgctgcggggtgggagcacctccaagggtggggaccatgcctgtctcgctgtggccgcctctgcagctccttgccattttccatgctgtccgcctctccctgatctggtgccagctcccgcagcctctgcgcctgggccggcctcccttccccctcgcaggggacctggcccacatctctgaccatccctcccttgacctccccctttgccctctgcctcctcttcctgtccctcaggctgactgtggttgccgctagataggaaatatctgtccttgtgtctcttcctctgagcctcagtttctcattttctctctcaatgtctctccatgtgtctcagccatgtctctctgcttgtctctgtctctttgtctctatgtccatgtctctttctctgtctctttcagagcatctctgtctttccatgtgtctctgtctttccttcccatgtctaagctgccttcatttctcctctcgtccccactccgtttcctaagaccacctccctctaacttccttctctagggcttttagcatcagtcttctcccaatccatccacagcttccctccctccatcccacttacctgacagccatcactgactacccctttctcccttctctcccctagtcctgccccaacccaatcctccttcccagccccccggcccaccctgccccaccccacagatctgcagccccatcccccacctccatccctgggcccatcagcctttatccgccatctttctccccagccctcctattctccctccactggcctctcccgccctcttcatcccacctacccccacccaccccctcctctcctgattccccctcccttcagccccgccccagacacacagggaggaatccagggctgcagcaagggtcaggtggtcagccagggagggaggcggcatctgctggagagactcacagacagacaaggacacacggacacagaggcaaggacacagccaggcatgcacgctccccactacacagttgcacacgcacaccctcagctgtgcactcagtctccccaccgtggctctcctgttcctctcctcctcccagcctcccatgcctgctcccctacatgaggggctgcacacacacacactgcagccccaggctgcgacactgcggagcctgcacacacacacacacacacacacacacacacacacacacacacacacactgcggagtccccccatccaggcctggaaggagaaagagaggtcatctggtgtccatcccacaacgtggacctatccgcaccctgccagggaagcaggggggcctcaataaccccagacgcactaacacgagctctcacagacacacccagacgcgatcgcagactttcagacaccacggggcccacacactcgctgccagggcctgacagagccagcagctctcatacgcacatgcaactgtgcacatgcaaccgcacaaggtcaggcggagatgctgagggctggcccacaacctcgcggatctccgcacacaaagccatgccaacgtgcgccacagaccccccgccgccccctgcggccccacgaccacatggattggctgggtcagccggctccccgggtctcgcaggcctggccccggagcgcaggggtcccggtgcccccgccccccgcgcacacccaatgtcaccggccccacaatgtcacacggaagcggcgcccagccggctcagcacctacccccatcttggcggctccgcggcgagagagccaggcgggcggggcggggacctcggggcgggctcaggctcaggcttgggctgggagcctctgcagcgcccgcgcctcggtaggtgcgcgcgtccgtccgtccgtccgttggtcccaccgcacagaggctgcggcggccgccgcctccgcctcctcatatgcccgcgtccgcgggaggggggcggcgctggccaatcaggggcgccgccgtgctgacggacggcccgcggccccgcccctggtactgcagctgtcctccccttgggctccgcaaagtggcggcgcggccgcgaagggggagcgctgcgggggtggggggattcccagagacctccgcaataggggacttggagaccccctcaatatggagtagggcctccaagaaggggcgctcagggaaagaaaaccccggaaatcctctcattgtgggggtgtgccatcaccgagaagggtacgctgggggagggggggcgggtagtgacacggggtgggagggaagcccggtgaatcactgcagtgtggcaccagggaccctggagacggcggggggtagtgctgttcagggagagggccctgcaggaggggaagttggaagggaacacaagagagcaagaaaggccttgcaattgaggaggggtgctggcgggaggagccctgagattccctcactgtgggtgcccccccactacgcctgagctatccaatgagccacaaccacacagggtacacgggagacacaacacggtggaggatggccccaggaggcccagaaaatgcccagcgtcacagttacacaggaccatcacactgatagcccagatgctggggacacgcacacaccacagggttgcactcatattccaccataggccagcatgtaccctcacacacacaacaccaccccaccacacacagagtctcaaacatagagtgaaacacacatagggcacacaccttacacacccatcacaccacaagagactcataatcacagccacaaagtgctgtgcggactaacaccgacactcagaaaatcgcagactcacacatcacacactctaccacacctgacctcccaccatctcacatagaaacccacatcgtgcaacccataaaccaacacacacctgcactcagcaccatcacacacgcacaggcctcacactgcctccagacacactacatcagcctttgtggacatcgttgcatgatcccacgatgtcgcacacatcctcacacacactgctccccagtgtgtttgggcatgagcaacggcccacagtgcaaagttgccaatgctaactgtgaatgacagacaaaaaggtgcacacacttacacatagcacaataattcaaacacaagtcacgcgacacccacacacctcccacacatacacacatcacgttattgcagcactatcgcagacatctttgttgcacctccaaacacaccccaacgccctcacccacatgacacacagagctcgtcacagtatatgtacacacacagatgcacagccggcacccacaccccaggcctgctgccgacacacaacaccccatcagccaccccactggagcccaagaagttgaggcctccccactcactccaacaccactttgttctatgaggaacaccccagactctccctggggatggtagaaggggaagagagagagagagagacagagagcatttgaccttgtagttttctcagaatgtgggtatcctctccacctatgggataggagatgtgggggacgcaggcaagggacagggagtgagcttggtgtatgagggtgggtgggtgaaggtcgaggacctggtgcagggaaatgtgtgaaaggctgaaggccagagagaggcacagaaacacagagattcagagccacagcatatggacagagacaaggccagagagtgaatggaggctttccccagtgcccagagccccatcccaatcctgtcctctgacccgtccccatctttctcgctgtcctttgttgccatggtaacagggagctgcttctgcagcaaaggaggttgggcctgcagactgggctgttgccatggagactgggaaagggggaggagccacatcttttaacccagatgcctcacccccagacgccccctccccaactctgccctcttcctaggggagggagagcctatcaacatatcctcctttccttctcttgacaccttggcctagaggcatgggcctggaccatggagaatgggactggggagatggggaagcctggggaggtgggggaggcctggattccaggagattctaggctctgtctgctcttgctctccagctgggccgggggaggccttgagcccttcccatcccacctcagacacaagctcacgtcccccctcatgcactctctcctcaggcacgagcctgatgagactgatgactgtgcatcgtgctcctggtgaggctctgcagaagtagggggggcggtgagaaggaaagacctgggaaggtcacagggataaaggggaataggggagctagatgtgagaggcggaaggagagacacagagggagaaacaggcagcccagaaccagagagaggcggatacaaacagattgaaaaagacagacagagattggcagatgcagagatgagaacacggagacagagcaacggaagagttcagtgaaggtgacagagacagagagacgtagacagccaggcagagacaggcttggtaaaccagggagactcagagataaaggccagggggagactgagcagaaacctggtaggggaccggggactcagaaatgggggagaccccagagggaattggcctcgaggcattgggacagagaagggggagaaaccagaaatgtctgtaatcatgttctagtcacctcgacaaagagtccgacccaagggcagagacattgattggagtgtgtaagagacgtggagatagagatgcgagacaacagagagaggctggtgcctgcccccacacctgtccgaggggcacgcaaccagggtctgagacgcagaaggggacgggtggcgacggggggcgctgtgtgcggggaggggtctcccagggtgtggccggcctgccaggactgcgctgggcaggcgggccctggagggaagtcgggcgctctgggctcaggctggccaactgggtgctgaacggacagctcccaagccccgggccgccgcccaggaacgggcgcagcctcgctctctctgggacctttccagtcaggctttcctttccgttccagtcccctccaggttccatttagttttttatggcttcctgtctctcaccccaactccgggtgtatcttaccctcccgcttcacctctggtctcagccctctattctttctccagtcttctctcacctcacccagcctctctccctgtctcgccggctctgtgtcctctagctctctctccccatccccctcccgcccactctgcccccttcgttgtctctccccatctctgtctctcgccatccctccatctctccctttctgctcggcctcgttttggctcttgctgtgtgaccttcactcgtccttcctcagctgcagtttccacagaaacctccggcggggcagggagggcggggacagaaggcggacccacctttctcctgcgccatcagcccttcagcctctcccacccctgcccgcccacccaccccccagtctactgggattcctcacttcctctcttgggggttggggaggtacattttcaacagaaacacgggatcacagccacagacagttgaagatggcctcgcagatgcgtgcacacacgatcacaacgtcactgaatcaccccggcccaggcacacactcgccaccccaggcacggccacactcaacagctcactggccctcccctcccccagccccatctgttttctgtctttctgtgtctccgcttccggtgtctccgcgtctccagatccctgcatctctccatctgtctcagggtctctgtcgcagcctccctctgtcctgagagaaggtcagtggagaggggccagctgctgggacccgggctggcctgcagcctgtaggcagggctgagggtggagagagcatggaagtaaccatcgaggctcactctgattctcagcaggtgccccggggacccaagcctccaaagccctcacacccccaggaaatgagagacggtatccccagttctggggttttgttcttttttttattccaacaggggctgcgatgtggcaaggggagggatgggggcccaactgaccccctccctgggggaggtctcatagaaattccgaggtttctccccccaaaaaagagaggaagagaagagtggaggggcaccaggggacacccatctgtccagaggccctccccacctccagaagcgtggggggctgcgtcaagtcttggggagcctgagcagtcccagaatggggtcctctccgctgactgctttccgcttcccagagccgcccccgaagtccccagcccctggagtcctcggttcctgcgcccttctcgcccgcggcaccctctcgcgagtccactggggggcgcaggcgggctccagagccaggcctcggacttcgcggggaaccaaaggcaaaatcgcggcgtccggggcgccggcgcacaagtcctgtcccgcgcccgctgcgggagcggagactgctggggcctggggcgggccccgtcccttcggtcagtccgggcgcccgcacagccccgcccgtggtcactcgtgctccgccagctcccgggggccggcggggccaggccgcggccggggcgggctggtggcttcggcggggacgcccaggccacgcggaggcgcgccggcccccgaggcccgcagcgcctggatgcgccggcactcctggcagacgcgcacgtgggtgcagggggtgggggcggcgggtcgggctccgctggggggccccgggtcgtccaggaggcgctgcgggcccccgtgcgcgctgcccgcatccccgcccgcgccggccgagtagagcttgccgttgctgaggcgcatctcgcggaccgcgcgcagtgacagcagggcccggctcgggccgcccgggcgtcggcgccggcgggaacgcgacgtcttgcggcaagaaacggcgtggcgcagctcctgcagcatctcctggcacaccgacacctgggggtggcgcgggcggtcaccgtcccggcgcagtccgcctcccgcctcccccagcccctctccacatcccactcctcctcctcctttcctcgcccgggtctttcttccttctgccctcgcttcccttcccacttctcttccctttatctcccccgtgttttctgcctcccctctccacctctccccacttatcttcaatgtctccattctactctgcgtttgttcctgaatctgcccttcaccttccacctaagctcctctctttcctctggtcttttcactgtctctaaattttctccagttcttccttcctgatttcccatcttctgcccctcatccatgcgttcattattgcaaggcatatttacctgtggcctgctgtgtgcccggcactgttctgagcactggggatatggcagagaaggaaacagacagaagtcccagccctcgtggaggttatgctcaagtgtgcagagacagaagataacagacatgtatgtagtgtgttaggcgtggtgagtgctttggaaagaaagaaaatcgggaagaggcctaaggtgtatgggtagggagtgacgatgaattctgagacaggacagtcaaggaagacctcactgagagaaggatccttaaataaagacagggtgagccactggagacctgggaagccagcctgctggacagataaccgggcagggccgaaatgcccaggtgggagtgacttggcacgtctgaggcactgcaagcaggtcagcatggctggaggggggcgtgcacagggaagacagaaaaatgaggtcaaaggagcagtggcggccagctctggtaaggcccataaaccactggaaggatttttggctttcattctgaaaatcagaatgagagtcagacgggaatcactggggagctttaggtagaggagtgctgtgttttcataggatcactctgtgttgagaacagattgtagggaggccaaggcaagagcagggagctcatggaggaagctatgacaataacccgggcaggagatagggatggctggaccagagcgacctgagaaaggtctggattctggatatattctgaaggtggagccaataggatctgctaagagatcagatacggggcatggaagagagagaatagtgaaagaaagctccaatattttggcccgagcaactggaaggaccaaattgcctcacaggtgggcagaagcccaatgttggacacatcgcatcacgtgcacacctatcagatatccaagtggagataccaagtgtggagctgaagttgcagaccttggcttcaggggagacacatatttgtgggttaaggcaggcagccttcaagatcccacctcccgcgtccacgcccctgtgtaatcccctctgacactgtgtcagagctggtctgtgtgaccaacagaataagtttcagccattgcacattctgcttccgccttgctctctctgatcactcgccctgggggatctcagctgccatggtgtgaggacactcaagcagtccttggagaggtccttgtctgaggaactgaggcctcctgccaactgccatgtgagtgtattcatcatgttttttattttctgtgtcttaggatgttttgacactttaaacatcttgcaggctggggagagactacccctcccagaactagccaagccttagagatagcagagggctcagctgcctttcatgtgcaaaccaaccaatctatacccccaacctccccctttacctaactctcacataccaagccaatattcttcctgacctaaatcaacccggggccaggtaccagataagtagggacagcccctatagcccagagtccactgacattatccaaactggtgaatcgtaagctgtttccccttctcctgggaaatgttaaagaataaaaatcatttttctttctgtttctttttgagacagtctcactctgtcacccaggctggagggcagtggtgcaatctcggctcactgcaacctccacctcccagattcaagtaattctcctgtctcagcctcctgagtagttgggactacaggtgtccaccaccatatctggctaatttttgtgttttcagtagagacagggtttcaccatgttggccatgctggtcttgaactcctggcctcatgtgatctgccctcctcagcctcccaaagtgcttggattacaggcgtgagccaccacacctgggcaaaaatcatctttcaatgaaattggtctccatgttgtcacttggccacctccagaaactaaaatcccatggggacatttgggacagtgagccatcttagaacggaaccctccaccctttgttgagccttcagaccacagcagtctggccaaaaaacatgactatgacctcatcagagacccatggcagccagaaacatccagctaagctgctccgaggctctggacccacagaaactgtgaaccaatggaagctggctttttaaaagctgttaaggtcatttgttatgatagcaatagataactaacacaagaatcaccagcacatagtgggtcttaagagccatttggctggtgggatcattcaagtagtggagaaagaccgagaagagaagcagtctaaggactgagccctggagccccacaacaaacagagcctggggagaaagagaaacccaacgagggagcctgggaaggagtgaccggagaagtgggagaaggggaagaaggggctttgaggattgagagtgactggctgtgccgaagcccactgctacctcatatacatgaggcctgagaccgggaatttcagacatggaagttgctggtgacaagagtggcttcagtggagtggcagggaccgatgccagactggagtggggggcaagaggaaatgggaggaaagaagaaactggaagcatcagggagaccccccactgctgccaaggctgtaaagagaagggaagaaagtgggcggtggctgggagggaaagtgaggtcaggagagggtttaagactggagaaatgacagcatatttgtacgttggtggcctgaatccaataaagagaggacaactgatgctgcaggaggaaaggacagacttgccggagggatgtccttgagaaggcaacctggacacgggtggagggcacctttactagcagcatggacggctccttcagaggagtccttgggccaagtgcagaacactggcaggcagctggatgcagagctggggtctggggagtagatgtaaggtcagccgctggatgtgaggagggggaggaagggctggaggctgacagagagaggggaagcagggaaccagcagtccaggggtgcaagagcacgaatgggtctggaaatgcaggggtgtggctgggcggcccccagggacatggaagcagccctcctgaacacagtgtgggaccagtccagggctgtgtcctcttctggttccctctgtcacccaggctggagtgcagtggtgcaatctcagcttactgcaatctccacctcccgggttcaagcgatcctcccatctcagcctcccgagtagctgggattacaggtgtgcaccaccatgcccggctaatttttgtatttttagtagagatggggtttcaccatgttggccaggctgatcttgaactcctgacctcaggtgatccgccagcctcggcctcccaaagtgctgggattacaggtgtgagccactgcacttggccctgtttctcttcttatttcttcttgcttttctgcctctgtggctccccacatcctgtccctcacctcctctccctgcatcctcattgctccctgtgcctactttccctcctgttcttcctcacgcgctgattctctggccccatcagctctcttacttccccacctcctgcattcctctgcccccttctcgcgatccccaccaccctccaggtatggctcccaatgccacaatcttcacgcacctcagcccctgggggtccctgttcctgcccacccccacccccagcctcctcacctcctcggactcagctgacctccgtgtggaccatatgaattccatgaccgccacgaagacagcaatgatgaggccacagatgagcacgataaaaatgccaccaatgttctccatgcccaaacctggagggcgaagggagttggggggcaaagggagttggggctgtgtgggaagggggctgggagggggctatgggaaggggacaccatacgcgggaactgacctttagctcgatggtcctcctccttggggcaccggcccccctcccaccacttgcgcttcaggatctccagccggttgttctcctgaagctgcaggatggccagtgtgatctcatcccggaacggggagcctgggcaggcacacgaggggctggaccagccatcgggccctgcagccctgaccgccccaaaccccaaactgtgccctcaccacggccttcccccgcctctaccacgtgcccagggtcttccctgcagcctctcctcacccccagcccagtctcctctcaacacagcagccagagagacagtgttaggaagagtcagaggccatacctttcctgtgctcaggactctccatggcttcctgttgcaagctcctcccctcggccactctcagacaccctcacccccacggctctcagctccagcctcatcagcctcctggctgctccccaaattcatcacacacagtcctgtcttaggacctttgcctctgcctggaatgtccctctccgcacttcatccaggtctctgcccacatgctggctccccagggagtctattctgatgactttatttaaaatggcaccaagcgccccactccctgtcagtgtcttccctttaatttactttggagcagctgtcaccacctaacactgtattatatggctatgtgtttatcatctttcgtctgcatccagtgcgggacttggcatgcagttggacaccagacgaatccccatccacacctctccctggaccacctctcctccccaacctcacatcctgcccttaagccatccttgggcttcaacaccccacacaccctattctatacttatttcttcattgactaagatacttcccgaccaactaccacagaaccagagacacgggcagatgaaagtgattaatatctaccaggcaccaactgtgtgccagaccctgggtttattcaggtcttatgatgatcctgtgggacaggtatcccacctgaggcaagtgtttctgaatgacgaaagtgatacacttgcttaagactgtgcactgagtcagggaggaaactgagatttcttcctttcttttgacagaatctcacttggttacccaggctggcatacagtggcatgatcattgttcactgccacctccacttcctgggctcaagcgatcctcctacttcagcctgtagctgagactacaggtgcataccacacctggctaattttttaattttttgtaaagacagggtcttgctatattgcccaagctggtctcaaaactcttaggttcaagtgatccttccggcttggcctcccaaagcactggaatcataggcataaaccacagtggccagccggaactgggatttgaatccaggtcggtgtgactcctgagcctgtcctccaagcaccaagctacactgcctccctggcaccgactcacctacaaagctgctaagatctggggcaatttgctatgcagtaatagataactaatacaggtgtcatcagtacataaatgattttaaaagccaaaatgccaaaatttggtgacaatttggtcgtgagttccaccactgagtcctggaaaaacatgtcctgggccatgcgaggtggctcatacctgtaatcccaacactttgggaggccaaggcgggcgacagagcaagactccgtctcaaaaaaaaaaaaaaaaaaaacaaaacaccaaacttgtcctgaaatataaataggcacatacaagtctccctaccagatcattccatccttcccatccatcttacaagcatttttcaagcacctgctctgagccaggctataggatttttccaagaaataggaaacaagaccaggtcctcacccccacagggcccttgggggaagacagcaagccccaccacccacatatactgaattgtatacacagtctcactgaattctcccaacagctctgggagggctggattgctgctaggcctggttttgcaggttgggggtacagaggctcaggacggtgatgtcgcctgcccaagaccatacagccaggaggccacatgcaacacacccagcctgcctcgggggtgcctggcccggtcctgggcctgctcacaggtggttttggatgcccacggccctgctgtgttccacaccgtgctgtgccgtacccagcggcatgccaatgccgtagcccttggtgtcgaggagtcccccgatctgggtgaggttgcagttgaggcgccggtggtattcgttcatggtggactcgagcaggaaggcgtagcgggagttgaggacgcgggcaatgccctcttctgtgctcttgacgaacacgctgggctgcttcgactgcatgtagttccacatgcgctggtacgtttggtaccgtgaattctgggcaggaggatcacaaggggaagatgggagggtctttccagccgcttcctttccccgagcccttcccatcctccaggaagtctccctcaacccaggagaatgcaaggtgatcaaaggaagacagagccaaaggtagaggagagagaggagatggacaaactgtccaggccaggtccaagtcatccccacagccactgtgcccaccacccacctggggggcccggtgagtgcacctccacctccttccccttaaccctccagccggtggccgctgcccaactcaggcctcctttagaccactaggacctccctgccaagcttgctttcctcttctttccttcccaccaccccaaaatacaaaagatcaagcacttttcaccttgaagggccttcccttctctctgtcagcccatattcctggtcccgacccttccagcagcctccttgatcccatttggcccatatgacattgacatttgataccacatatgcctccctgccctcattccccagttccctagccagccagctgcgagccccatgacagcacatgtgtgttttctgctccccagcctccaggctgtcactgacaatcagtccctctgacccaggagaccctgcccagacccatcctgagctgctttgcatggcagggatcccaacaccacgcctgagaggttctggtggccccacctggaagaaggtcatggtggagccggcgtggatggtgccatactcgatgttggtctgatctgccaggtcatcggccgactccacaggcacctccatgcgctgcacggtgaggaaggcggccaggttggccgtgtaggaggagatgatgatcaaggtgaaggcccacctgaagggtgggaggggtgagtcacgggctggagtcacccctgctgacctgcccccgtggccatgccccccattggtggtgcccctcccaagtgaccccagcatctggaagactcagtgactgctgggtgcagaagcggggagtgtggattctgaagccagacttcctggttgtaaatattgcatccggagacttctacttccagatataaaagagtaagatggtctggaaataccctcccaccataaacagctaaagagctggatagaatacaggaaacttttttcttttttttttttttttgagacagatcttgctttgtcagccaggatggagtgcagtggcacgatctcagctcactgcaacctctacctttggggttcaagtgattctcctgcctcagcctcccaagtagctgagattacaggtgcccaccatcacgcccggctaatttttgtatttttagcagagacggggtttcaccatgttggccaggctggtctcgaactcctgacctcaggtgatccacctgcctcagcctcccaaagtgctgggattacaggagtgagcgaccacgcccggccaggaaactatttaaaacataggacaagagacatcatagaactgtgatccctgagaagagaaacaaaatgagtcttattgtccaggctgcttggctggatttaatttataggaagggaagcccaaacagcccagcaatcctgctgagttgcagagacggagactggtgatcaggcaggccaacatggctggaatttgggggatagagtgcctgagaggagggagctgcaaagagagggaggattcagaaaccggtggtccccttgagtctttggctgaatatcaatctgtgcatgcatggggtgaaactctgtggggctggacaagagcaactttcaaggagaaaacaattcttagagttgacacagggctgagagtcttttgagctccctgcagccagagtagaaagatttcattgaatacatgagacattcagtagagacccaaaagtgtaacatactagaaataggattaagttagccctagaataaaggcaatgctaaagctgcactaaaaaagcttaaaaacaggcctagaagtatcaaagtaattcacaagtaacctaactagattccagaaaaagtttataaatactctgtaaaaaaatatattcagcaatgtaaacaatgtctgttatgtaatttttttttttttcttgagacagagtctcactctgtcacccaggctggagtgcagtggtgtgatcttggccactcccgggttcaagtgattctcccgcctcagcttcctgagtagttgggattacaggcacctgccagcacgcctgactaatgtttgtatttttagtagagatgaggtttcaccacgttggcaggttggccttgaactcctgacctcaggtgacctgcccacctcgcccacccaaggtgctgggattacaggcatgagccactgtgcccggcctattacataattttttaaaaaaataccaggttgggcacggtggctcacacctgtaatcccagcattttaggaggctgaggtgggcggattgcttgaggccaggagttcaaggacaacctggccaacatggcaataccccgtctctactaaaaatacaaaaattagctgggtgtgatagcacacgcctgtgatcccagctacttgggaggctgaggcacgagaatcgttggaatccaggaggtggaggtcgcagtgaaccgagatcaccactgcactctggcctgggcaacaaagcaagactcttgcctcaaaaaaaaaggaccaggtaaacaaaggtgcaggaaaatgtgacctataaccaagagaaaaatcactcaattgaaacagacccagaattgacatagatgatgacggaattagcagacaaggacatgaaaacagctattataaatacattcagaatgctcaagagtataaagaaaaacatgaacgtaatgaaaggaacagaagatataaaaagaagtgaacagaacttttagagaatgatatacacatatctgaaagaaaaattttactgaaagggattacacagattagacaccggcagcagaaaagatgagggaatttgggccaggcacagtagctcatgcctgtaatcctagcacactgggaggccgaggcaggaggatcacttgaggctgggactttgagataagcctggtcaacatagccagaccctgtctctacagaaaaataaaaaaattagatgggtgtggtggtgcctgcctacagtcccagcaacttgagaggctgaggtgggaggatcacttgaggccagaagtttaagtctacactgagcctggtcgtcactgcactctagtctgaatgactaagtgagaccttatcgttatttttttattttatttatttatttatttttgagatagagtctcgctctgtcccaagctgaagctggagtgcaatggcgcgatctcgactcactgcaacctccgcttcccgggttcaagcgattctcctgcctcagcctcctgaatagctgggattacaggcacccgccaccatgcccagataatttttgtattttttgtagagatggggttttgccacgttggccaggctgagaccttatctttaaaaaaaaaaaaaaaggctgggcgcggtggctcacgcctgtaatcccagcactttgggaggccaaggagggaggataacctgagttcaggagtttgcgaccagcctgactaacatggcgaaaacccttctctactagaaatacaaaaattagccaagtgtggtggtgcatgcctgtaatcccagttactcaggaggctgaggcaggagaattgcctgaacctgggaggtagaggttgcagtgagctcagattgtgccaccgcactccagcctgggcaacagagtaagactttgtctcaaaaaaaaaaaaaaaaaagccaggcacagtggctcaggcctgtaattctagcactttcggaggccgatgggggcggattgcctgagctcaggggttctagaccagcctgaccaacatggagaaaccccatctctactaaaaatacaaaattagccgagcatggtggtgcacgcctgtaatcccagctacttgggaggctgagacaggacaactgcttgatcccaggaggtggaggttgctgtgagctgagatcacgccactgcactccagcctgggcaacaagagtggaactccatctcaaaaaaaaaaaaaaaaagattagagaatttgaagaactgcaatagaatctatccaaaataaagcacagaaaggaaaaagtgatgaaaatgagcacagagcctcaatggcctgagaaataagtggctttacctatgtgactggagttccagaaagagaggagagaaagggataaccaaaaaaaagtctgatgaagtaatggcctacaacttttcaaatttgatgaaaaccataaacttgcagatgtaagctccataaaccccaggtaggctaaacacacatatttataaaacgcaccaagacacattataatcaattgctgaaaaccagcaataaagagaaacatcttaaaagcagctagaaggggggaaacatattacattcagagaatcaaagataacagtgccagtcgacttcttgtcagagagtgtgcaagcccaaagatgatgcaacatgctgaaagaaaaatcaaaacaaactgtcaacctagaattccacagcaggcaaaaatatccctcaaagaagacacactaacacatttttcatacaaaaccaaagctgggagaattaattgccagcagacccgcacagcaagaaatattaaaggaagttctgcaggtaaaagaaacacaacaccagatagaaacgtggatgtaccagaaggggtgaagggcaccctcttcaaatggtagatttgtgggtaaatagaaaagatatattcctcactttcaaatttccttacgaagcatttagtggtttggttttgtttttgagacagggtcctgctctagggtggagaggcgtgaacacagctcactgcagcctcaacctcctggacccaagcaattctcccacctcagcctcccacggagctgggaccacaggcatgcatcaccatgcctggctaatgtttcttagtttttgtagagatgaggtctcgctatgttggccaggctggtgttggacgcctgggttcaaggaatcctccagcctcggcctcccaaagtgttgggattacaggcgtgagcaccacacccagcatttactatctaacacacacacacacacacacacacacccctaatgtattgtggggttcataagatatgcagagctcaaaggacgggagggtgagaggaacatatcatgttgtcaaggtcttatatcttacgtgaaatggtataatgttacttgaaagtattttgtggctgggtgcggtggtttacgcctgtaatcccagcactttgggaggccgaggcaggaggatcacgaggtcaggagatcgagaccatcctggctaacatggtgaaaccccgtctctactaaaaatacaaaaaaattagccaggcgtggtagcgggcgcctgtggtcccagctactcgggaggctgaggcagaagaatggcatgaacccgggaggcggagcttgcagtgagccgagatcgcgccactgcactccagcctgggggacagagcgagactccgtctcaaaaaaaaaaaaaaaaagtattttgtaataaattaaagatccatattgcaaacccagaaaaccactaagaaaaataaaacaaagaagtacagttaacaagtcaagagtagagataagcagaatcttgaaaatcccaacaggccaggcacagtggctcacgctgtaattccatcactttgggaggccaaggtgggcaaattgcttgagctcaggagtttgagaccagcctgggcaatgaagtgagatccggtctctacaaaaaatttaaaaaattagctgggcatggtagagcgcacctatggtcctagctacacaggaggctgaggcaggaggatggcttgagcccaggagtcgtgttcgtgccactgcactccagcgtgggtgacagagtgagaccctgtctcaaaaagaaaagaaaagaaaagtcccagtaaccccctaaaggtagaaaaagaggaaaaggggaacaaagaacagatgggacaaatagcaggttggtagatttaaacctaaccatatcagtaattacattaagggtaattggtttgaaccagcggctggctaactatggcccacaggccaaatctgacctgctgtctatttttgtacagccccataagctaagaatggcttttacatatacatatatgtatatgtatatatacatgtatgtgtatgtatgtatgtatgtatgtatgtatgtatttatttatttggagacagagtctctctctgttgcccaggttggagtgcagtggcacgatctcagcttactgcaacctctgcctcccaggttcaagcaattctcctgcctcagcctcccgagtagctggaactacaggcgcacactgccacgcctggctaattttttgtattttagtagagatggggtttcaccttgttgcccaggtaggtctagaacccctgagctcaggcaatccgcccgcatcggcctcccaaagtgctaggattacaggcatgagccaccacgcccggccagttttcacatttttaaatggttaaaatgaaatcagaagaacaggctgggcgcagtggttcacacctataatccgagcactttgggaggccaaggtgggtggatcgcttgagcccaggaattgagactagcctgggcaacatggcgaaaccctatctctacaaaaagttagccagactgggtggcacgtgcctgtggttccagctactcaagaggctgaggtgggaggattccttaagcctgggaggttgaggctgcagtgagccaagattgtaccactgtactccagcctgggcaacagagtgagatattgcctcaaaaaaaaaaaaaaggaatattttatgacacatgacttatataaaattcaaatttcagtgtcagtatccataaataaagttttattggaacacagccacactcattcatttaatgtatcatctacaacagcttctatactacaatggaagattgagtagctggaacaaagaccatatgatcaacaaagtacaaaatatttacttagggccagagcagtggctcatgcctgtaatcgcggcactttgggaggctgaggcaggaagatcgcttgaggccaggagttcaagaccagcctgggcaacaaagtaagaactctctacaaaaaaaaaaaaatgaaaataataaaaaattagccaggcacgtagtcctagctactcagtaggcggaggcaggaagatcccttgagcccaggagtttgaggctgtagggagctataaacacacagcactccagcctagagacagagcaagatcctgtctttaaaaaaataaaaataaagataaatatttaaaaacatctttttttttctttttttcttttctttttttttttttttttttgagatggagtcttgctctgtcgcccaggctggaatgcagtggggcgatctcggctcactgcaagctccgcctcccaggttcgcgccattctcctgcctcagcctccggagtagctgggactacaggcacccgccaccgcacccggctaattttttgtatcttttagtagagacagggtttcaccatgttagccaggacggtctcgatcctctgacctcgtgatccgcccacctcggcctcccaaagtgctgggcttacaggcgtgagccaccgcgcccggcctaaaagcatctttacttagagaaaacataaatgtttgaggtgatggatttcccaattaccctgatcccagcatttcaggatgctgaggtgggaggactgcttgagcccaagagtttgagaccagcctgggcaacacagtgagacttcgtctctaccaaaaataaaaaaatttagccgggtgtggcgtcgcacacctgtgatcccagatacacaggaggctaaagtgggaggatcacttgagcctgggaggttgaggctgcagtgacctgtgatcacactactgcactccagtctgagtgacagaacaagactccatctcaaaaaaaaaaaaaaaaaatcacctgtactcccaaaaatatgtacaactattacatataaataaaatttaaaagaaaaattactggccagacacggtggctcacacctgtaatcccagcactttgggagtctgaggcgggtggattgcctgagctccagagttcaagaccagcctgggcaacatggtgaaaccccatctctactaaaatacaaaaaattagccaggcgtgctggcgtgcgcttgtagtcccagctacttgggaggctgaggcaggagaattgcttgaacctgggaggcagaggttgcagtgagctgagatcgtgctgttgcaccactgcactccagcctaggcaacaggtcaaaactccatctcaaaaaaaaaaaaattttactatctggcccaatgcagaaaaaattggccaaaccttgctccaaggcctaagtatacactgtttataagaaacacacttggggctgggcatggtggctcatgcctgtaatcccagcactttgggaggcagaggcaggtggatcacttgaggtcaggagtttgagaccagccttgccaacatggtgaaaccctgcctctactaaaaatataaaaattagctgggtgtggtggcatgaacctgtagtcccagctgcttgggaggctgaggcaggagaaccacctgaacccaggaggtggaggttgcagtgagctgagatcacaccattgcactccccaatactcaccacacacttggtcaggtgtggtggctcatagctgtaatcccagcactttgggaggccaagatgggagaatcacttgagcccaggagttggaaacctgcctgggcaacaaagtgagaccctatctctatttaaaagaaaagaaaaggaatgctctttaaatataataatctagatgggccgagactaaaagaatggggaaaagatatgctatgcaaacattaagcctcagaaagccagagtgcctatattagtatcaaaaaatgttaacttcagaacacagaatgttaccaggaataaggagagacattatataatgacatgggtcaattcacctagaggacataagagtcctaaacatttgtgcgcctaattacaaagcttcaacatgcatgaggcaaaaatggatagaattgaagagaaacggataaatttcctgcaattacagggtgagatttcaaaactcctctcaataattgatggaacaagtagaaaatcagtaaggatagagaagacttgaataacatgatcaacctactggccccaatggacccttatagaacactgcaccaccaacagcagaaacacattcagtgcaactccacatagaacagttaccaggacagaccatatgctgagctctaaagcaagtctcaataaatttaaaaggattaaagtcctctagagaatgttctctgaccacgatggagctaaattagaaatcaatcatagaaagatctctggaaaatccccaaatcctgtcttctccatcaatgccttgctgcgtgaccttggaagtgtgctgcagtttcctcacctgtgaagttagtacaattgtaggcccttcctcactgggttttgtgaagagtgactgagttcatccggcacacagcaagtgctatgcaagtgttttctctcattgtcttggtgacacaggaccgacccgggagaataggctcccaccagcctggctgcaggaccccagagcaaccacttgtcttaccgtggccccctctgtcctccctcctggcaagtaagaatggccagggtccctgtagaccatatagatctgaggggcctgaaggcagaggagatgctgaaaagggcctcccagacctcccaccctcacattcccagcacgtaataatgaaaacagcaatgtcctccacagaacacatgtgcaaagctatgctaggcactgggatggggatggagtgagggcttgatagagagacatgaattaaacagcctcctgaaaaataaaaccaaaaccccaagacacaaagacccagggactgactcaacctctccagaaaccaagtctctccaaacccatcttacaggtcaatgctgccattcatgcaaaacaaaattatttggccaggcacagtggctcacgcctgtatcccagcactttggaaggccgaggtgggtggatcatctgaggtcaggagttcaagaccagcctggccaacatgatgaaaccccgtctctactaaaaatacaaaaaattagccagacgtggtggctggcacctgtaatcccagctactcgggaggctgagccaggagaatcgcttgaacccggaaggtggaggttgcagtgagccgagatcgtgccactgcactctagcctgggcaacaagagcaaaactccatctcaaaaataaaaaaataaaaacaaaacaacaacaacaaaaattactcagtgcctggtacacaccatgcaccctctggcccctgaggacacagtgtggatgactggtggtggtgatggggccactcactaaggcagcagagggaacacagactgggagtcagatttgggagtaaagacatgagctctgttttgcacaaggtgagtttggagatgcctgttgagctcccaagaggagcaatcccagggggctggacacatggaggggtctagagatgacttcggaagtgttagtatgcgcatagcatgggaagtccagcagcaggtgagatggcccctgacaaggtgtatggaacagtggtctctggcagggagggcaccctgggaggtgtttggtaaagtgtgggccactggtgctcagcgtaggacagccggataattcgaggcctggtctgaacaatggggaatacctgttctgtgattatctgagcctaactccttggtacattaaaaacccaagttttttttttttgcatgattataatataaaccaaaatctccagaaatgcacctcttgttttaatcgagggatgactggatgttgttttgtttggaactttgctgagagctgctcaccgttgggggaaatcatctgtctctgacagcaactccactcgaactcaagacccaagtcaagacccttgcaccagctgcattagcaaatcatcacgttcacagtgacttgtatttgcacaaacatactcatttgtcaactatttcgatgtgtcagatatcaagtggcaacataattctgttaaatgatcttacttctcatcatgccacttactcattctaagcaggcgccgactgtcgcattctgtcttctggcatagccacacccaggcatttgtgtattgccataatattattttattggaagtcacttccctgctttttccccttcatattgcaattatggcgttaaattgattttttacaaattatgtgtgtaggaagatatattacccttgaatttcagctcagtgtggaaaaggacgtattaaaaaatatttgttataaaaagagggtgttgggtctgcaagcactgaaaactcactagtgtgagtgagaagccccatttgaggggtggcaaaggcaaaaggaacccacagcaaatgaaacaggaccagagaggttggaggaaaccaggaggacacagagcctagaagcaagaagagagtttctagaagggtggctaaccgggcgaatgctgcctggaggtaagacagaggctggaggcatggataaggggtcgcatgtgcgcctggtgcagctggggttgggggaaggcaggcaaagccaagctactggctagatctgaggttttgtggttttctggccaggagggcgtgaggaaaggaggacctagggaaaagttgaggacaatggctgcagagacagcctaggagccacctggagatggacgagtgaaagcaggaagggctcagagaatggaaacagggaggtcagaggactcatcgcaccaagtgaccaagggagagttgggagggatgggggccatggtcagagtgaaaccttagaaatactgactcccggctgggcgtggtggctcacgcctgtaatccctgcactttgggaggccaaggcgggtggatcacgaagtcaggagatcgagaccaccctggctaacatggtgaaaccccatctctactaaaaaaaaaaaaaaaaaaaaaaaaatcagccaggcatggtgttgggcgcctgtagtcccagctactcgggaagctgaggcaggagaatggtgtggacccgggaggtggagcttgcagtgagccgggatcgcaccaccacactccacgctgggcgacagagcgagactctgtctcaaaaaaaaaaagaaaagaaaagaaaagaaataaagaaatgttgcttctcagccaggtgccgtggctcacacctgtaatcccagcactttgggaggccgacccaggtgagtggatcacttaaggtcaggagttagagatcatcctggccaacacggcaacaccccatctttactaaaaatacaaaaattagtgaagcaaggtggtgcacgcctgtaatcccagctacttgggaggctgtggcaggagaatcacttgatcccgggaggtggagattgcagtgagctgagatcgtgccacagcactccagcctgagcaacaaagcaagactctgtctcaaaaaaaagcgggggggggggggggggggaggaaaagaaacgttaactcctgaggcagagctgtcctgaatagtgacaagccctcaggtgtggctgcaggaggctgtgggctgagggggccctggagaggaggggcccaggtagtgggctgtggccaggctgctgcagatcagctaccaggcaagtcctcgagggtgatggcaccaaatctcaccccctacactggaccctgagtcccacgagggcggggactggcctgctgaatcatggtgctaagtcacatctgaagattctcaaacatctgctgaatgagtgaatgtgtgggaggactttgggtgcagaagagagtgggccccagggccaaaggctccgatgagggagggaacatgagtgggggctgtctgggtgacagcgatgggaaggggcagaaaacagctggctagagagtgtgactctcaggaagagggcccctggctgggcggcagaaacagtggccagcagagatgagggcactggtctcccccaaccctcctgtgaggacgccactagatttgtcatggcaggtctcctaggcgccctcccagcacctcacacacctggccctctccctctgtctaaaatgctcctccctctccttggcatggacgactctgtttctgcctttaggactcaacccagttcacctcctcaggggacccttctctgactgcccccatgctctactgttctcttactgtatcctgtttggttcctcaatagcacattttatgtgcatctgcaacatcattatatggaaaatattagtacatttcacttggactgtgtggccggcagaataggccccgcccaccagcaccaaagaagtctctatcctaatccccagaacacatgaagatgtgaccttactcagcaaaagagactttgcagctgtgattaagttaaggatctggatatggggggattactctggattatccaggaaggcccaaaggaatcacaagggtccttaggagtggaagaaggaagttagagagagagatttgtggatcctatgctgctggttctgaagatggaggaaggggccacaaaccaaggaatgcaagtggcttctaaatgctggaaaaggtaaggaaacagattctccccctggagcctccagaaggaactagccctgccaggaacttgattttacgccattgagatctatttcagacttctgacctccagaactataggataatgtgtattgttttaagctaccaaatttgtggtaactttttgcagtagcaataggaaacaaacagagctttcattgggtttttttgggggttttttttttttttttcatttgagacagtctcactctgtcatccaggctggagtgccgtggcacgatcacagctcactgtagcctcaacatcccaggctcaaacaatcctctacagggttataatttgaaatgatacccatccaaaaccatttaaaaaagccatcaagactcgcaagtgtccaagccagtggaccaagtgaattgctaatgcctgccataccacagttagttctacttagttaggagaagggaaaaacctgccacctattaaggttagtcttgacttgaaaaaggcacaaattaaataatatctttgggacctattctttgaataaaataggatgtccagtgttgatttatctgtttacttgtttattctcagctcctctgcctctccaggacaggaatggggctgattcctcacctgagtgcctggcacatggacaggctcaacaggcatctgtgaaattgttagaggcgtgtgaaccagagcaactccatcttgaataggagctgggtaaaatgaggctgaaacctactgggctgcattcccagacgtttaaggcattctaagtcacaggatgagataggaggttggcacaagatacaggtcataaagaccttgctgataaaaggggttgcagtaaagaagccagctaaaacccaccaaaactaagacggccacaagagtgacctccagtcatcctcactgctacactcccaccagcgccatgacagtttacaaatgccatggcaacgtcaggaagttaacctatatggtctaaaagggggaggcatgaataatccaccccttgtttagcatgtcatcaagaaataaccataaaaatgggcaaccagcagccctcagggctgctctgtctttggagtagtcattcttttatttatttatttattgagacagagtcttgctctgttgcccaggctggagtgcagtggggagttctcagctcactacaacctccgcctcctgagttcaagcaattggagtagccattcttttattccttagcagcctcactgaatcctcacaaccctgagacatgggcatctttctccccatctttcagggaggtcactgaggcaaagggagggttgcggtctggccaagctcacatagccagtaagcggcagagctggagctcagctctccccaccccattcctcgtcacacagctctgcaagggaaaacggggaatcaaatcttccaggagatgccacagccccaaccccatccaggcctcagatgggtccctccctcgccccgggcagaggcagatagaaagcttctcaccagactccgctgacacagcgcgtggacagcgcccggggcatgatctccgagccctgctgcatgaagccccccacgggaaaccacaggctgttgcccagcgtgtactggttctccaggatgtgggggcgtgcccgcaggcatgggtgtgggttataccactcataggggctcagcctgtggagagacgtgcagcgtgtggatggggcccagagcccaggtggggaggaaaaggaaagaagcaaaggaaagtcacagtgatcagaagaaagggggagagatggaaaaaggagcaagatggacagaagcacacagagaaaaggcagagagagatgcacagagatggagacagaagaggcagagagagacacagagatactcagagagaaatagagaagggaggaggcaaaaaagggagaggcgggaaggggagagacctgaacagagaaccacagagcacagtcagagccacaaggggaagaatgagactcagacacagggcacaaaactgagaaaggagggcacagggaatccgaggccccaaaggggaggccaaggacagttccgagagagaagaggcaggtcggtcccagaggcctcggctcgtgcctcctccagccccttccttcccagtaggcagtggactcacctggcagccagaaacaggacgcagctgacagccaggtaggcaagaagcatgaagagccacacagcaggggagaaggggtccaggaaggagaagtagccaggcttgcggccctgtggggagagggagtgagacccggagacacccctggcctgagcctcacacccagcccctgccctaccagggacctgggagcctgaccggcccatctgaggtcctggggctgtctggctcccactcgcaggccctgagcctccatgccaggcaagcagcccatggtctccaggggaaccataccatgtgcactcggtagaggatgctgatccccagggtcataaagggcttggaaaagtcgatgaccttctcccgctcagctgtgatggtgaaggcggccacagccaggtctgccttctgctggaggggaagccgggcaggggtggagggggacagaggggaagacagaagtggacagttagagagaaatgcacggagagtgagcaactgagggaggcgagagagagagaggtagggagggggaggggccaggagcatggactgactccaggagcccaccttgggcctgaaatcggaccctcatcgcatgtccatcctcatcatctcacgtctccagacacactgactccgtcccctaggcctcaactgtgtcccagcatcaagggctggggatggaggggttccccaaactccaattcaagcagcaacttctccctagggccataaaagagccaaggtcctgaaggggctgagactgacagcactcgagataatacaggcccggacagaacacagagcagggagagaggaggcagggcccagaaatgaccccgggtggggaggaagggtgcaggtcagcatgtgcccacagccagtggagacataacccaggccccggcccagtgtatagtcagggagatagggcacaagccccaaacagcatcctggtcaggagacgacactggtaccaaagcacaaccctggatgaaggagggatggcccaggcccaaaacttcagctggaatcagaaatagatggcacaggacccagatacaaacccaaggttggtgagagatggcacaggcacaaatgataaccaccaggtagagagaggtggcacaggctgaaaacaaaatccacggtcaaagagagagcagacaggcccactgtgaaatccagggtcggggagaaaggacacagaccccaaagatgaccccaagcagagagggagatggcgcaggctaaacagctaaagccgggtacgggagagatggcaccagcctcgataaaaccgaggagcagagtgagacagcacagccctgaagcatcatccagaggcggcagtgtggcaggggcccagaatgtggattcggagaatctctctgggaattcctgggtgttgagcatagggagcttccatcccctttgttgtacacttgccacttttatgactaatacgtgaattgtcgtggaaatcatcacagctaatataggactccaattattttaagcacccactgggggtctgtcctagcaaggccctgcatggtggccacatcctcatttcagagaggaggaagcaatggcctttcaggtgggctccagtcctggggccaggagctcaagaccccacttcctcctgaaagcctaagggcccccatcctttgttcccacactggccttctcctcactcattcctggggccatgcctcgggccagacacctgcctcttgctgggctgggcaaggacaggggctctgctcccgaaacactcctcagatctgtccatttctctacaactccaccacccgggcctgggccactggtatctcactcctgactacagcactggccgcctcatcggcgccccctgccgccactcataacctcccagtccattcctcacatataagccaagaggacagtctcctgtttaaaacctgccatggcttcccccagcacttaagacaaaaccttctcatggccaagaggccctggcgacctagggctcagctgccctgccagcctcccctcatatcttctgtcttgccagctgtgctccagccatgatggcccgttctttcctcaatgcagcaggctcatgcccgcctcagagcctttgcacatgctctcccccaagctcttcttccccgttccaggctcccatcacacccaccccttcagccctccccaaagcagcctccagaccccacctcactcccactctagggtctctctcacattccccattggcccttttttttttttttttgagatggagtctcactctgtcacccaggctggagtgcactggtgcaatctcaggtcactgcaacttctgcctcctgggttcaagcaattctcctgcctcagcctcccgagtagctgggattacaggggcatgccaccatgcccggctgatttttgtattttttgtagagacggggtttcaccatattggttaggctggtcttgaactcctgacctcaggtgacctgcccacctcagcctcccaaagtgttgggattacaggcgtgagccaccgcgcctggcctcattgtcctgttcttagcacgactggagatggccttactcaggtgcttggtaataggctgtcttcactccatacaggttccttgcctgtctggctcagtgaggcagcccagagcccgcagagagcaggttcccaacagatcctgctcgggtttgaccgagtacagcctctctgactggcattccaggcagccgacggctcccccaccgcattcctgggccactcgccacccctctctctcgtgccagcttctttctggctacgcctgaggcgcctgtccactctgtagagctggatcccatccatccctccagggctcctcacaccttcactcctctgggaagccattcatggacccccactccctggacaccacttgatctcaacaacttgctcaatttggaaaatatctgtctcttctctgcctctgctgctaaaccacaggcgtttcagaagcaaggccagctggacatgtcatgtgtttctggcactgctcaggggccagcttagagcaggatctgctgtgtctcatgtcccatcctcctccgctgaaacccaggaatgttgctgcttcctctggggccctcccagatgcagagacctcttcttccctggtgccacaatgaaacctcacgcagtcagacgcttgcatgcacacagcacttaccccatgcagccactgtcccagggttttccccagagtagactggtccccagagcaacccaatgcagagggacctccatttctaccattctacgcatgaggaaactgaggcacagagactaagcctcttgccacagttgacccttggattcggaaccactcccctcctaggggctttatctgcctgctgccctggtcgctccatggctgggggtgtctgaggtctggcccaggtgagtgactcctccctggatcccagggagttcaagaaatgagggctgactgatgggaggagtcagtgagtccttgaacctctggccaatatggcggcggcagcagcctccacctctccctgacactgctccacatccagtcttccagccagcaccatcccagacagaaacatgggggttgtcctgtacacagcctctccctcacccctcactgcatccatcctcaagcctcctgattttgacccctaaacacctccggaacggagtcactgccctctgcctccactgcccacacccgcccaggccaccatctctgactgaatagctggtctctgcctcccaggacacacagcctgcagccccagagataccaacatatgacagtctggtcacagtattttcctgcttagattctgcaacgggctgggcacagtggcttatgcctgttaacccagcactttgagaggccgtcaggaggattgcttgagccaaaagttcaagatcagccagggtaatgtagcaagaccccatctctactaaaactaaaaataaataaataaattctgcaatgactctgcttgtttgtatttttctttttagagacagtgtcttgctttgttaactaggctggaacacagtggtgcaatcataagtcactgcagccttgaactcctcaagtgatcctcccacctcagcctcctgagtagctgggaccacaggtgcgagccactacgcctgactaattttgtttatttcttagaaagaccagggtctggctatgttccccaggctggtctcgaactgctgggctcaagtgatcctcctgcctcagcctcccaaagtgcttggattacaggcatgagacacagcgccttgttctttttattattattattattttttagaccaagtcttgctctgtagctcaacctctgcctcctgggtttcagcaattctcctgcctcagtctcccgagtagctgggactacaggcagatgccaccacacctgtctaatatttttttagtagagatggggtttcaccacgttggccaggttaatctcgaactcctgacctcaggtaatccgcctgcctcagcctcccaaagtgctgggattacaggcatgagccaccgcacccggccctatttattattattattattatcattatttttggagacggagtctcacttgtcacccaggctggagtgcagtggtgcaatcatggctcagtgcaacctccacctcccgggctcaagcaattatcctgcctcagcctcccgagtagctgggattacaggtgaatgccaccatgcccagctaatttttgtattttagtagagaaggggtttcgccatgttgcccaggctggtcttgaactcctgacctcaggtgatccacctgcctcagcctcccaaagtgctgggattacagacatgagccactgcacccagccaccttgttcttaaactgtcatccaaatgcctcacccgacccaatgaggccctaactacacctatcacctcaataagactatgtgccatgcctgttccccttatgagactctgtcttacacctggccccaaaacgtcccgcaccatccaacccccacagcctcatcccctaccatcttgccctgtgtcccacattgcagccacactgccctttccatttgttcattctttcatttatttacctgcctgacaaatatttgtatagcgccctccactagcccagcacaattctagctttggggatacggcggtgaatagaaacatacaacgtcaggtagtgacaagtgctgtgatgaaaaatcaagcaggcagcaagagagagactcgagggagatgctgttttggatctgctccccactgttgcaaggggggtcttatttgaatagcaacatgaaggaagtacagaaaaggcaggagaagacctagggggaaggttccaggctgagtgatcagcgggttcagtccctaaggtgggaagagacttgcagcatccagcaaggctggagcagaataggagggcctgggaaggcagcagagtggggccaagagcctggcagggccttgcgggccacagtaaggtaactggattctgcaccttgggcaatggaggacattgcatgaggatgtcatataggaaggtgtgaacagagggtgacattatcagaccacaggcacaagagtggatgtgggaaccagggagccaactgcagatgcccatcacagtgctgggggcaggactgagtggcagcactggtggtggagagagacagtgagatttgggtctcatctgaaggtgtgatggaaggatcctaaatgctgcaagttcttcctaggctcctcccagagcctttggagcccccttccctcctcctactcacttttcatttctaaaagaaaggcttatttatttgtttttgtttttgagacagggttttgctctgtcacccaggctggagtttagtggtgtgaaaatggctcactgcagcctcaaactcttgggctcaagcgattctcctatacctcaacctcctgagtagctgggactataggtgtgtgccacctcgcctggctaattttttcattttttgtagagacgggggtcttactatgttgcccaggctggtcttgaactccttggctcaagcaatcctcccaccttggcttcccaaagtgctaggattacaggcgtaagccaccatgcatggtaaaagacctattccttagagatgacttccccaccctgacatataccctctagcccctaccctgacgggccccctcacagttatttaatctctgaaatgaaatcaggaagaatttgaatgacaagtcacctgtaatgatggggggggggtgtcatctaaatgcccaaagccaatcaaagcacttgtgatagtccctcagctcccaacccatcctgtataccctgttctgtgtaaaccatattcctgctttgcctgctgcgccctgccaggctctgccaatagggggcgctagcgggaggttgccagactgaggagggaagagggattgctccttcctgtctcctctcccaccccagccaccttctgcccctcctggcagcatcgtttcttctcctggcagcagatgaatccggtgtgcagcttcccaatatctacaaacccatctcatccagcctctctccagaacccagcaccagctgtaagcacctctccccagggtctgactttcagctccacagagcccttcctctaagtttccaagagtttcagctcttccctttcttccttcagaactagggatgtggccacttcctgccatgatacctccatgacacctgagagtgaggggtgggaaagctatggcccttgggccaagtccagcccatctgcctgcctttgtacataaagttttattggaacacagtgatgcccactatattgtccatgactactttccatacaacagaagagctaaggagttatgacagtaaggccttaaagctgaaaatacttacactcttggccagaaaaagctggctaggtcagtgcagtggcccatgtctataatctcagcactttgagaagccaaagaaggaggattgcttgagcccaggaattcaagactagcctgggcaacacagtgagaccccatctctacaaaaaaaaattttttttttgagacagagtcttgctctgtagctgggctagagtgcagtggcgcaatctcagctcactgcaacctccgcctcctgggttcaagcaattctcctgcctcacccttccaagtagctggaactacaggcgtgtgccaccatgcccagctaatttttgtatttttagtagagacggcgtttcaccatgttggccaggatggtctcgatctcttgacctcgtgatccgccctcctcagcctcccacagtgctgggattacaggcgtgagccaccgagcctggctgctacaaaaacttttaagaattaactgagcataggtgtttgagaccagcctagccaacatggtgaaaccccgtctctactaaaaatacaaaaattagccaggcttggtggcaggcgcctgtgtaatcccagctacttgggaggctgaggttgcagtgagccgagatcgcgccactgcactccagcctgggggacaagagtgagacttcgtctcaaaacaaacaaaaaaaccctagaggtctgcaccatgagctagccactggtgcttgctcaaggctccatacagcattcctatttgccatcaatactttgcgaatgaatctcccgatctgctggttacatctggcccaggtggcagatcagctcgcatgcagcctggactggctgcagagtctttgatgctctggacctcactccagatgaaaaaagccttacgggctgtagggaaagtaaatggattgaagtagcacatcccaatgtggtatgagttgccaccaaaatccaaaaagtccaccaaatgtcacatcatcaaccaaacagcaccccctcctcagcagtctgtctcagctctgtggggccctcctctaagcttctaagttttcatctttcaaactcttctacttgtcccttaaggactaagtgtggtagctgctttctgccgttgctactgccatgacctcttagttttctttttaccccttaagttagctggttaacaactttacatttagttaacaattctttatactaaatactctctattcaaataactgatatgattctattcaagtaaatggagctgggttttgttttgtttttatttttgtttttgtttttgtgacagagtctcgctgtcgcccaggctggagtgcagtggcacgatcttggctcactgcaacctctgcctcctgggttcaagcgattcttgtgcctcagcttcctgagtagctgggattaaaggtgcgtgccgctgagtctggctaatttttgtatttttagtagagatggggtttcactgtgttggccaggtgatccacccacctcagcctcccaaagtgctggtattagaggcgcgagccaccgtgcccagccagggttttgtttttgtttttcagacagggtcttgccctgtcacccaggctggagtccagcagcgtgatcatagctcactgtagtctcgaactcccaggctcaagtgatcctcccacctcagccttccgagtaactgtgactataggcatgtgccatgcccagctaattttttttttttttaatgtttagtagagacaaggtcctgctatgttgctgaggctggtcttgaactcctgagctcaagcaatcctcctgccttagccttccaaagtgctgggattacaggcattagccactgcatctggcaaccggcgctgttttgtatccagactggaccctgccagactggaccctgccagactgccatctgccaggtttaatgccaactgcactgactcaactacttcctgctcatcagatctgatcagcatactgttgtcaatgtaggggaccagtgtgaggctatgtggactgtagagttcaagttctttgcagcctaaatcaggacagaaagtgggaaagttgatgtcacactgagcaagactgtgaagatgtgaaccttgccttctggtagcccttggaaattggtatggagaaaaaagcatctgccaggttagtagctcacaccagctgccaagggctgtgctgacttgctccaatagagaaacttcatttgggacagcaactgcaattggagtcacccctgatcacgttgacaataatccaaagtcattcttccaaaatccatctgccttctgtacaggccaaacaggccagctgaatgtagatgggatcactacccctgcttcttccaagccgttaatggtgacactaatttccacaatttgcacaaaggatagagaattgcttttgaattactattctgggaaagacagggagttctaggagcttccacgtggctctttctaccataatggccctgactccatgggtcagtgcgccaacgtgggattctgccagctaccatgtgtgtctattccagttatacaaccaagaactgggaaaacacagggtgggaccatggccccatcaggccccttctgagttaacctgggctcagattccaccaatcacttgaccacataagtcccactgtgtggtctaccagtcaaagcaggaaaaatcaaaatgatatgccatccatgaaaatgacagggagttgtctaagtagctaaaagccgataaaaacactcaatgctgagaaggagcctatatagaaactgttgtagtctttctggaaaataattcaacaaaatatcacgaaagccacaaaaagggtattcttcttccacccagttattctgttcagagaaccaatcctaagaaaataggctgcaatgcaggcaaagcttttgtgcataaagatgcttgttggccaggtgcaacaacccatgcctgtaatcgtaacactttgggaggccaaaatgggtgaaccacttgagcccagggactcaagaccagcctgggcaacaaaatacaaaacaattagccaggcatggtggtgcacacctgtagtcccagctactcaggaggctgaggtggaaggagcacctgagcctggggaggttgaggctgcagtgagctgtgatggcaccacagcactccaacctaggcaactaagtgagacgccaatctcaaaaataaaaaaaagatgtttgttaatgattatttataagagcacaaacaataaaaacacctggaaacaactagttatgaaaaatggctaaataaattatggtacatccacatggaattactactatgcagccaagtaacattctgtttaggttaaaacaatgatattatatttggcctttgagatgggcaaagattttattttagagattggtaacactgactgttggcaagagtatgggaaatttcacattctcatgcactttggtaggaatataaattggcgaagcctttttgaacagccatttggcagtatacacttagaaaaaatttataccctttgacccagcactttcacttcttggaatgtatccctcaggaacactcccacaaatccacaggccaagtttatcatgacactggctatgctagcaaagctggaagccatccaaatagccatcaataggggatatggtaaataattcatgctgagccacacaatggaatccttatatcctcacttgaattttaagcaggcatctcaaatgatccgtgaccagagaaaactcttgtttcccggccccagcaaactgctcctcccatgtcctccttatagtggaaactggcctcgccattcgccagctgccctggccaaaccccatagtcaccccgattcctctcttcctcttatgcacatccaagctggctgcacacctgacacagctgccactcaaaccaaggcaacatcttctctcatccacaccctccaacagcctcctaaatggaccattcagtttctactcttgtcccactaaggtgttcctcaagacagcagccagtgcaatcatttttaaatgatttaaaaattagatcctgctggcctatgcatacaatggaatattattcagccataaaaaggaatgcaggccaggcgcagtggctcacgcctgtaatcccagcactctgggaggctgaagcgggtggatcacgtggtcaggagatcaagaccatcctggccaacatggtgaaagcctgtctctactaaaaatacaaaaattagccgggtgtggtggcgtgtgcccgtagtcccagttactcaggaggctgaggcaggagaactgcttgaactcatgaggtggaggctgcagtgaaccgagatcatgccactgcactccagcctgggcgagaaagcaagactccgtctcaaaaaaaaaaaaaaaaaaaaaacggaatgcagtactggtatatgccatgatgtggatgaactttgaaaagttggaaacatcatgcaaagtgaaagaagccatacacaaagaccgcatattggatgattccatttatgtgaaatatttgcaataggtaaacccatggagacagaaagatgggtggttgccaggggttggggtagcggggagggagtggggagcgactgcttaatgggtatgagttttatgggaggttatgaaaacgttttggagctagatagcaatagtgattacacaacactgtgaatgtactaaatgccactgaattgcactccttaaagtggttatttttatgtgacataaatttcacctcagtaaaaaagagaaaaaaaattgatcaggctgggcacggtggctaatgcttgtaatcccagcacttttggggggccaagggagatggatcatttgaggcaaggagttcaagaccagcatggaaacaaggcaaaacgccgtctctattaaaaatataaaaattagccaggcatggtggtgtgcgcctgtaattccagctatttgggtggctgaggcacaggaattgtttgaacccaggaggtggaggtcgcagtgagccgtggtcgtgccactgcactccagcctgggctacacagtgagactctgtctcaaaataaaataaaatatcatggcacattccttgcttaaaaccttccagtggctctgcagcacgataaaaataacagccaaggccaggcatggtggcttacacctgtaatctcagcacttcaggaggtcgaggcaggtagattgcttgagccgaggagttcaagaccagcctggccaacatggcaaaactctgcctctacaaaaatacaaaaaccagccaggcgtgatggagcgtgcctgtaatcccagctactgggaaagctgaggtgggaggattgcttgagcctgggaggttgaggttgcagtgagccaagatggcaccactgcattgcaccactgcactccagcctcggtgacagagcaagaccctgtttcaaaaactaaaaaataataataaaaaataacagccacactccttagcagtgactgtgaggccctgggatgtgggccctgctctcggatctctctgcccctcactttttcccctcaaccacacttttcccctcaagtctttatacatatgggctctctacttggaaaacactcttccccagatccatcctttcacttggcaattatttgctgcgcaccagctgggtgtcagatggttctaggcgctggggatgcagaagtaaggaaaatagtcaaacttctgccctcataaaaccctccctggtggctcttctcaggactgtattccccaccccttttaggtctcttctcaaacgttatccaaccaccttgtctaaaacagcatccacgcaccagacacttttatctccttaccttgcttcacctaacacgatattaatatatcatacgctgtcagtttcccccactagaacatcagcagttggggcggggggcgggaaggaggggacaaggagcacctctgctcattacattgctgccccctagtggccaggatgcagtgggtgcagaatagttgctcagtagttattcagtaagtgaatgactaaatgtagctggtttgtttttgttttcgtttcgctcttgttgcccaggctggagtgcaatggcaccatctcggctcaccacaacctctgcctcccaggttcaagcaattctcctgcctcagccccctgagtagctgggattacaggcatgcgccaccacatccagctaatttttttgtattttcagtagagatggggtttctccatgttggtcaggctggtctcgaattcccaacctcaggtgatccgcccacctcggcctcccaaagtgctgggattataggcgtgagtcactgcgcctggcctaaacgtagctgtttttaaagatgaggcagatctatgtgtactaacgtgggaagatggccaagttacaagtaaaaaaagcaaactacacagcagtaagtatagtaagatatcatttttgcaaaaataaaaatttaagaaatttaggctgggcatggtggcttacgcctttaatcccagcaccttgggaggccgaggtgagcagatcacctgaggtcaggagtcgagaccagcctggcctacatggtgaaatccccatctctactaaacaatacaaaaaaattagcctggcatggtggtgggcgcctgtaatcccagctacttgggaggctgaggcagaagaattgcttgaacctgggaggtggaggttgcagtgagccaagatcgtgccactgcacgccagcctggggaacagagccagactctgtctcaaaaaaattaagaaatttaaagatgtacctgtattaatgaatttgtagaaaatgagttggaggaatatggtctctgaggtgtaagaacatcatgtatatccagtgtttctgctatttgtaccatttggtattttatcatttagtattacatatataaacagaaaataaaggagttccttctcaaataattgcttatgaaaatttctgatggtatgcaaaaatgctttttaatgcatatatacttgctattgttgtgcaaaataggattatacttaatacaaatatgttttataaccggaaacacagtataatgtaaaattttttaatgaaatggactttatttatttatttatttatttttatttttgagacagagtctcactcttgtcgcccaggctggaatgcagtggcgcaatctcggctcactgtaaccttcgcctcccaggttcaagcgattctcctgcctcagcctcctgagtagctgggattacaggtgcacaccactacgcctggctaatttttttgtacttttagtagagatggggtttcaccatgttggcggggctggtctcgaactcctgacctcaggtgatctgctcgccttggcctcccaaagtgctgggattacagatgtgagccactgtgcccagcctatttttttaaaacagggtctcactctgtcgcccaggctggagtgcagtggtgcaatcatggctcactgcagcctcaacctcccagactcaggtgatcctcccacctcccagcctcctgagtggctgggactacaggcacatgccaccacacttggctaaattttttcaatttttgtagagatagggtttcaccatgttgccaaggttggtcttgaactcctgggctcaagtgatcctcccacttcggcctcccaaagtactgggattacaggcgtaagccaccatgcctggcgtgtgtgtgcgtcttctatcagatgaagagaactggggacaacatttctaaagactccttgatagaatcagtcaattgcccattcaacactaatttactagaaacctgccatgtgtcaggccctgagctggggacatagctaagtagacaaggctcccatccccagggtgtggaggccacaggtgaggtgggtgggtattgtcttggtcatgccagcatctatgacctgtgctgatctcatctgtcccctgtgatacccctccaagttagggggtcaccactccccatttgaggagacactaaggctcagagggggcagccacctgcctgcaggtcacaaagccagtaaggagtaagtccagatttgaacccagggttagccgactccaaaacccattcttctaactacactcacatacagaccgcctcaagaaaggtatctagcagtagtgaccacatgtgagccaggcatgtgccaggctctgtgcaaatgcgctctcatttaattgccttaaaactcactggctgggtgcagtggctcatgcctgtaatcctagcactttgggaggccaaggcggacagctcacttgaggtcaggagttcgagaccagcctggccaacatggcgaaaccccgtctccactaaaaatacaaaaatagccgggcattgtggtgcattcctataatcccagctacttaggaggctgaggcaggaaaatcgcttgaaccctggaggcagaggttgcagtgagccgagatcacgccactgcactccagcctgggcgacagagtgagactctgcctcaaaaagaaaaacaaaaacaaacaaacaaaaaaaccctctgtgagggaggtaacattagccccttttcaagaggagtgactgaccttcagagataagtggctttgcagggatcatgtgggagcactggggacctgaagctggctccttctggctcctaaccagtgcactgctatagtggactccatggtggctacccagactctgtttcaggagtggggcactcattgcctcagctgcccagggtgtaggtggctgatggctctcagctctgtcagtagaagagcgtcccctcacccaaagtcctgactctccccaagagcagcccacgtccagtgacatatcagtgggtgcttaaaggcctggcacccttaccacagggggaggtccttgacggccagctcagctccagagctgcctgtgggacagctaaggcccagttgtgactgcagcgcagctcaactcctctgcccaagcctgcttccttccctcctgcacagggcaggtttccaggggcacgccatcacacctcctgcctctacatctccatctcagagtcagcttcctgggaccctgacctaagatcttctttgcccttgaaggctaagctttatcctgagggcctcaggggcttcagttaaagcatacaagtgacagatcagactcacactgtagaaaggttctattggaggacaagctggggagtggagagactagaagccaggaggccagtaaggaggctgatgagaggggtgggacctgaattcacaccatggcagtgatggcagggagaaggccaatgtcagccatggccactgggtggaaaaaatgggtcataattcaagacaggccaaggagacctgtgcctggcccaggggtgactggcaggatggtggtgccccaggctgtcttccatctggaagtcactcaccagctctgggccaccctgatggggtgcccaccttggctctcctggtcactagccatgggcctggacatgaaaccttgatgcctcactgtacatttgagaaaacggggctaataccagtccctctctcactgggtggccatgaggagtcaaggatggagacaagtcagaaagctcagacaagggcctggcacagcgtgccactccatcagtgtactccgagcttcccaagttcccagctggagggctggaaagggcacgggccttaagtcagacacacctggctgcagccctgtgcactggggactccagatctcacactgggcagtgatcctcaggccatgaaggactgctatgaaaattatgttaagtaacacttgaaaagttcctcgcacatggtgtgaaatcaacaaatgacagctgctgctgttgtgatgacggtggtgactattcctgtgcagctcggcacactcggctatcccacagcagggcaaggccaaactccgcctatccttcacgctccagctcctcctccagtgttctccctgtaaatgtcattgccatcacccagatgcccaagccagacacaggaggaatgctctccctcctgtcctctcctgcatcccccaccctaggcagtcaccaagccctggtgctctttagcccttcccctagtctctagctctgacgttctcccgcctgaggcccaccagctcattccttatctcctcactggtcttcctgttaccactgcttcccccaaccccagggccaattcacttgagccagatcaaaacccttcaagggtggccgggcatggtggctcatgcctgtaatcccagcactctgggaggctgaggcaggtggatcacctgagttcaggagtttgagaccagcctggccaacatggcgaaacccatctctactaaaaatacaaaaattagccaggtgtggtggcatgcgcctgtagtcccagctactcaggaggctgaggcaggagaatcatttgaacccacgaggcagaggttgcagtgagccaagatcaccccatggcactccagcctgcctgggcagcagagccagagtccgtctcaaaacaaaaacaaaaacaaaactcttcaagggcatcccatgggctttctgctgaggcccaaaccctttagcccactcagtaagagcacatcgggcttgttcaccatggtatccccagggtatagcacagggcttggtatacagtaggcactcaacaaacattggctgaatggaaaatggatgaacacacaaatctatgtatgtgctggccatgctggtatgaataataacaataataaaaatagtataatcccagcactttggaaggctgaggtgggaggattgcttaagcccaggagttcaagaccagcctaggcaacagggccagaccccatctctacaaaaaacacaaaaattacctaggcattatggcatatgcctatagtcccagcaactcgggaggctgaggtgggaggatcgcttgagcccaggaggtggaggctgcagtgagctgtgattgcactactgcgctccagcctgggcaacagagagagacccagtctcaaaggaaaaaaaaaaaaggacacacgcatacagcacccactatgcaccaggccctgttctaagttcttcactgcatgttgttcttcaaaacaaccctatgtgctaaagggctgttattccccaattttacagttgaacaaactacaacctaaagaaatgttaagcacttgcccaaagccacacaaccagtgcacagcagagctaagctttaaacagccaaccacagacactctcagctgccacactttgctggccccaggccccaaatcctctcaccctaccctactgagtaggccctgagacacaaaggtcagacagctgtaaataagaactgttccagacttctctgttggtgaaaaaagggcatccagtttagagtgacttcaggtgcagggctactcccttggagcctgcttatttctgggataccagatgaaagaatatttctgagcctacgtgactaaagaccaggctgtggaaacaggtcacgaggaagcctgtgccctcaggtgggcatagagctgtcagctctggggcttctcatctcctgtctcacccggggcctctttgggcttcaggctttaaaattcaccctgggctgggtgtggtgtctcatacttgtaatcctagcactttgggaggtgaggtgggcggatcacttgaggccaggagttcaagaccagcctggccaacatgatgaaacctgttgctccaaaaaatacaaaaatcagccaggcacggtggcgcacctgtaatcccagctactcggaaggccgaggcaggagaatcgcttgaacccgggaggtggaggttgcagggaggcagaggttgctgtgagcagagatcgtgccattgcactccagcctgggcaacagaggagactctgtctccaaaataaataaataaataaataaaataataataataataaaattcaccctgaccttaaaactcaccctggggcagaagttttcaaaccagctggcagctttatggggcagcgccttgggacctgcctgtggggtggggtgggaggcacccccatctctgccttcaccagagcagctctgctcttgcccagggttctgagggagtttgcaattggaaaaaaagttctgtcaaaataacttttgaaagtcagtgccctaagggataaacgtccttgtcaagcaaagtggccctctcatgtcttccctcgtgatgttcagggggttggatgctgtaaattctggcatgagagagaggagggtgagaatctctgatgagctctgtcaagtctaacgtcaaggctgccctggccatctctggccacagccccttggtctgcacaccagctctgggagtgtcctaatcaggggcctacttatctcccagggcacagtcctgcctctgggcagttgtgcccatagtttctcccacctggaataaaaagaggaactacatttcagtcccccagtatctgccaagcgatgtgtgaggtacttgtccccacgtcccgtaaccctcactatagacctgcaaggtattattatccccatcttagggaggggaaaactgaggttcagaggagagaaatgacacttaaggattcaaatctaggagtgtctgacacccaaagatcctttccactgcacccttgcctgccacctcccatggccctgccttccatccctcctcagctgcaaccaaattctgcccacgctcaggccccgctggttcctccagtgcatcccactccctagtatcgccccatctttgtagatgctatttcccctgctccaaatacactccccttctcccacacccccttcaccttgctaactccttcatgacctttgggaatcagtttgggtatcgtctcttctgggaagccctactgggatatctgactgggtcaggaacctcctctgggaccgtcctctgagctccccaatcacagcccagacagctctgtgctgtggtcattcactgtcttgcgccccaaagagactctaagctcttgggggcagggtccagatccactgtgctcacagtgggatcccatgcccagcaagaggcaaggcacatagtaggtactcaataaacagccactgaatgggtgaatgtatgagttctacatgcagccctccaggtccatgatgtgccaggccctccctagcaggtgctgggcatagcacacaggtgaggtgtgctccctgctctcagccctgcctcctgcaggaagcctttgacctcctcagaccttttcctgctccccactccatgtctctttcattcacttaacaaatctttgcacaccgactaatccaaggtggcatgaaaggggcatttggcaaagcaggacacaggtggtgatgcatgtaccacctctcctcctctgtcccatcccacagcacccgccaggcacaggcatacagcgcaacatcagtgaggtggtgtcaggggcccttcatggctccttcctcttctgccaccagccaggctgcttctgaggttcgactggctgcccagctgcccgccctccctcactcgccgggtccatgcatctttcccggccccagtccagccatacccggttgatgagctcgccaaccatgcccgtccaggagccgttgggctcgggcgccccgtacagcccatcctccaccaaccgcaggcggtagcggaagcgcagcagctcggccagctcccgcagcatgtccacgcagaagccctcgaagcgttcgttccccgacagggcctggaagttgggccggcgcatgacgtatgggttctcctgggtgggcagaagaaagcaggggtcagaggctgggtgtctagtggctgggttgcggatcctggagcccggaccaggcaggtagagcaggaatctgcttgctgagcacggttgatttattcatagtacacatttctcacttacaaatgctcagagtggggaatagacctgaaagccagggaaaaacacatgggtactgccagttcctagcagattgcagggagccattttaatcttcagcagccaacctgatgctcattggtgccaagctcaaatgcgtatgagggaggaggtaactttagagtcagactggatagatcttgtgccaaagtggatcaggggctttcagatttcttattacaattcacagtaaaagatacattttaccctgcaacctaattcacccacacatgaacacacgtaactagacttaattccacagaacagtccttgccctagtaactatgggcaatacactgatattttctattctgctatacttcatctttccacatggctggtaatgactcaccaaaccaacttcatgagccactaatgggttaaagatggtattccctcaccagggtttagctccagtccaattccccatgagggaggcaggctgaagatgacagatggtgcaattttttttttttttttttttttttgagacagagtcttgctctgtcacccaggctggagtgcagtggcgcgatctcaactcactgcaacctccacctcctgggtttaagcgattctcctgcctcacccccgccaagtagcttggattacaggtgcctgccaccacgcccgcccaattttgtttttgtatttttagtagagacggggtttcaccatgttggccaggctggtcttaaactcctgacctcaagtgatccgcccacctcggcctcccaaagtgcaggtgtgagccatcgcacctggcccagatggtgcaattttaagagaatttggaaacttaagattgttttataaagtctcctggttataaatgttagcaactctcatgcctgaaatctcactgctttggaaggctgaggtgggaggattgcttgagcccgagtttgaggctgcagtgagctatgactgtaccactgcacttcagcctgggcaactgagcaactctgtctctaaaataaaataacataaatgttagcaactgatacggttaggctttgtgtccccacccaaatctcaccttgaattgtaatccccataatccctatgtgtcaagggagagaccaggtggaggtaactgaatcaggggggcggtttcccccatgctcttctagtgatagtgagttctcacgagatctgatggttttataatgggctcttcccccttcactcggcacatctctctcctgctgccttgtgaagaaggtgccttgcttccccttcgccttctgctatgattgtaaatttcccaaggcctccccagccatgctgaacctgtgagtcaattaaacctctttccttcataaattaccgagtctcgggcagttctttacagcagtatgaaaatgaactaatacagcaaccaattcaaattctaataccaattattattaaatgttctgcaggccaaaacaaacacagtttctagtttgcaatctctgacctacagtcagtttgccacattgacgcttatttctgaggggtttgagcaaactttactgatcccgttgtgccaaagaaacacaaaagcagaaagaatggtccaagtgctaggaaaacaaggcatgtgatgatggtaacaaatgggaaacttatctggacacagttattgtctaaatggttgtttgtacaatgtcactttggaataatgaacaaaaggacttaggacttagggaagagccaggaaagagctttggttaaaatatacacaatgagccaggtgtagtacctcaagcctgtaactctaacactttgggaggccaagacaggtggatggcttgagcccaggagctcaagaccagcctaggcaacatggcaaaaccccgtctctataaaaaatacaaaaattagccaggcgtgctggtgtgcacctgtagtctcagctactcgggaggctgaggtagagtcccagaggctcaggttgcggtgagccgagatttcaccactgcaggccagcctgggagatggagcgagactctctcaaaaataaaataaataaaatatccacactggttattgtgtattgagaaactgtgctgtgcattctctcgatgacattattttaattccttatggtgaccttacactgaaatgggcataagtagattccttttacacatgtggacacggaggctcaaagtggttaggtgacctctgtcacctctcattcattcaacacacaattactgagctccatggtagatgtggccacaatattgtgctgcttcttctagcaacagatggggtccatttctccctgggttcagacttcttggtctgagctggccttatgacttgttttggccaactggatgtggcagaagtgatgccgtgtgaattccagagtctcagccttcagagcagcccccatttaaggaagcccaggctggcctgctggagggtgagtgaaccaaggcatgccagccaacagccagcatccacagccattctgcactttccagtccagtctggacaccagctgaatgctgccgcagtgtgcccaagtgagaccagccaaagaaccactaagttgacccacggaatcatgcaaaataatcaactgctattgtttcagtttctgggttctgggtggtttgtcacacagtaatagaatctcctactatgtggccaggtcataggctctggactccaggaccccacagagccctacagctacagggtgatggaatggagggcagtcagtgattctctattaagctgcctttccagaaccaaaattgtggaacggggaacaagaatgtgagataatactaataatagcggcagcagccagcatttcttgtgggcttgctgtgtgacagcaattccgtcagcgtgggatggcagtattattacgtctcttttagagatgaggatgctgaggtccagagaagtgaagtagtaagtggctgagaaggacaagttggtctgattccaaagctccgctcttaagccctgtgctagactgagctcaagtggacagaatcagacagtggatatgggagaagccagagagagacgagggacccaggttgggtatcaaagctggagaatcagaaactgagaatcctagagacaagggcctggctcccatacagcccccttgacatatagaggatagaaccaaggctcagagaggtaaagcatctagcccaaggccacccagctgaagcagggcagtgggaagggagacggggcagagctgggcttcacaacccagtcactgtgcactctgaaccctgttccttccactatgccaagctgatctctaaattcaagactgaggaacttaggttcagggtctcaggactggggtctgagcttagggagacaaaaagagactggggcctgtgaatagaaattagataaccgtaatctaggactcaacttagagtcacagactatcagaacagaagggtcctcaaggagcctcaaatccagggtcttcagacttcaaaaagaatcttatgcagaagcccaacactgcagccagacaatgagatactgctaagtccagttctaagaatttaccctacaaatggctgtgcatcaaaaacgcaggtccaagaaagtcagtgcagcattgcttgtagtgagaacaaagactgaaacaacctaatttgggccaagttaaaaagattatcgatgtcataaaagaatcccaggcaaccactaaaatagcaaggtctacaagatatattaggaggaaaaaaacaagctacagaacaacgtgtacaatatgctactctttgttaaagaaagagcaacgatgtgcttgtatatgcatagacatttctgggaggatggtggcctctgaaaaaagaaaatgagagacccagggaaggaaggaaactgatttttcactcctcacctgccttgtactctttgaattctattttacgtaggtttgtattaacttctgtcccttccccaattttatttatttatttttgagacagagtcttgctctgtcacccaggctggagtgtagtggtgcaatctcggctcactagaacctctgcctcctgggctcaagtgattctcccacctcagcctccggagtagctgggaccacaggtgcgagccactaagcctggctaatttttgtattttttgtagagacagggtttcatcatgttgcccaggctggtctcgaactcctgagctcaagtgatctgcccaccccggcctcccaaactgctgggattacaggcatgagccaccatgctcagcccccttccccagtgtaacaatttttttaaaattgaagtatgatatttaagtgtgtatgaacatgcatggttggctgggcttggtggttcacgcctgtagtctcagcactttaagaggccaaggagggaggatcacttgagcccaggagttcaagaccagcctgggcaacataggaagaccccgtctcaataaaaataacttataaaaaataaaaagaaatgcaaagagtcaagaagaaccaaagtaatcctaaagaagaaaagcaaaactgggggtttaccctgccaaatgttaacacttaatttaaagctatggtatttaagacactgcagtactagaacaaagacagacaaacagacaatagaatggagtgtttggaaacccacatataaatggatattgatttgtgacaaaggtaaaactgtcctgaagggggaagaattattgttataataaatggtgctgctgaattaaatacccatatggaaaaaaatgtattctggccaagtgcggtggatcatgcctgtaatcctagcactttgggaggctgaggcaggtggattacttgaggtcaggagttcaagaccagcctggccaatatggtgaaacccctatctctactaaaaatacaaaaatcagccaggcgtggtggtgggcgcctgtaatcccagctactggggaggctgagacaggagaatcacttgaacccaggaggtggaggttgcagttagccaagatcgcatgctactacattccagcctgggcaacagagtgagactctgtctcaaaaaaaaaaaaaaaaaaaagaaaaaaatgtattttgactcccctacctcacatgctacataaaaatcaatttcaggaggatggcagacccaaatgtaaaaggcaaaattattaagtttttagaacacaaatagtagaatatcttcatgatataggggtatacacggaattcttaaattctaaaatcattaaccataaaggaaaaaagctgatgaagagaactttggtaaaattaaaaatcaaatccttttatccaaaatatactactgagaatgaaaaggtaagccacaaagggggacaggacatttgcaatacatacatcagacaaatgacttgtacccaagaatgtataaataactcacaatcaggctgggcgcagtggctcacgcctgtaatcccggcactttgggaggccgaggtgggcagatcacgaggtcaggagatcgagaccatcctggctaatcggtgaaaccccgtctctactaaaaatacaaaaaattagccgggcgtggtggcaggcgcctgtagtcccagctacttgggaggctgaggcaggagaatggcgtgaaccgaggaggcagagcttgcagtgagccgagattgtgccactgcactccagcctgggtgacagagcaagattctgtctcaaaataaaaaaataaacaaataaaaaataaaaaataactcacaaatcaataaaaagtcacatatcccaatttttttaaaatagaaaaagacatgaataggaaccttgcaaatgaggatttccaaatagccaataaagggccaagtgtggtggctcatgcctgtaatcccagcactttaggaggtcaaggtgggtggatcccttgagcccaggagtccaagaccaggctgggcaacatggtaaaaccctgtcaattaaaaaaaattgtttttaattagctgggtgtggtggtgcacgactgtggtcccagctactcaggaggctgagataggagaagtgctggagcctggaggtcgaagctgcagtgagctacgattgggccactgcactccagcctgggtaacagagcaagaccctctctcaaaaaacaaaaacaaagaaaaatcaaatagccaataaacacaaaaaggtgttctcccttcctgatcattagggaaatgcaaatgaaaaccaccatatatggttggtacctttatacactcaccactgacaaaccgagtagcaagtggaattttcattcattcgctgccgctgggaatgaaagtgaaagtggttcaaccactttggaagacacttttacaatacgtgataaagctaggacaaacaccctgggacccagcaactagaacacacccaacagaaacaccagtacatgttcaccaaaagacatggaagagaaccttcctagtagtactattcctaacagcaaaaagccagaaacaaacgtccatctagattggatgaatcaggaaattgcagtacattcaacatacaacaatgagactacactacttgcaatgacacagatgaaactcataatgttgccagaagaagccagtctcaagaaagaacacacagtacgatgccatttatatgaggttcaagggcgggcaaagctgatctgtggtgacggaagctgagatgggggttagccttggagggttagtgattggaagggcatggggaggctttgggttggggacagctggttggttacacaggtgtgttcagtttttgaaacttcagtgagaagtaacacgatttgtgcacatttctgtatgtgtgttacacttcagtgaaaatcaaaagtaaaaacaaaaaattaaagtagggtaggttctagaacattccttacaagctgattgcttggaccctttcatgaacctgggatccaaatccttgtccaggatttcctgcagtgtcaacactgatctagtccaacctcctcactctgctatgaatattttatttacgtatttatttattattattatttttagacagggtctcactctgtcgccctggcagtggtatgatctgggctcactgcagcctcaacctcctgagttcaagtaatcctcctgcctcagcctcccaagtagctgggattaaaggtgcacaccaccacgcccagctaatttttgtatttttagtagagatggggttttgccatgttgctcaggcttgtctcaaactcatgggcccaagtgatcctcccgcctcagtctcccaaagtgctggggttacaggtgtgaaccaccatgcccagactgctaggaatactttaatcccctcactttaaaggaggaaactgagtatagagagacctgctaggggcaaacagtgtgtggatggcagtgccaggctcaggacacagccctgagggctcagaaagtagtagaaataatggaggcaatgtggcctggcacggtggctcacgcctgtaatcccagcactttgggaggccgagacgggcagatcacgaggtcaggagatcaagaccatcctggctaacacggtgaaaccccgtctctactaaaaatacaaaaaaaagccgggtgtggtgacgggcgcctgtagtcccagctactcgggacactgaggcagaagaatggtgtgaacccaggaggcggagcttgcagtgagccgagatcgcgccactgcactccagcctgggtgacagagcaagactctgtctcaaaaaaaaaaaaaaaaaaattaaaaaataatagaggcaacgtggtgcaaaagacaggcatgtgggctctgctgccttctagctgggcgaccttgggcacgtcatttaaccctcctatgcctgagtttcttcatccgaaaatcagggcttctgtgaagattgtgtcacatgagcacagggcttggcacaacactcaaagccatgaaccacaagctcaggagagggagggagggagggaggtgctctcacacgtaccttgggcactgcaagggccttcttagctcatgtgatcctcccactgcccctcaaggcgagacgcagacccgttgtatagataaagcaatggatactgtagttaagtgacttgaactaataagagcggaggaatgggactgaggtccctctgtccgcagcagagagactactcttaactgccacactagtcaccaaagggcagagtgaggcatctcagctcaatgaagggaatcctcaggaccacctgggtaccctgacaaattctccaagactggggcgagaccagcggctgaggagggcgggcctatgcacagcctcaactccgtgggacttctgcacccccagcttccccatggggcctctctctatctcagcgccagcccatcctgtctcagcacaagatccctgagcctgccccaggggcagcgccagcctgcaccccatcaccagaggccctcgctcccacacccggaccacctctaatccctagcagcatccctcatgggccaacaaggagccttcctgactccagatctggccccgccccttcctgctcaacactctctccccaaggtaaagcacaggacaactgagtccttcagagccccttccccacctgctgccccgcagcccctaggctgcctctgtcccaacactcaccacaaccctctgtacttgctaggtattagtcacagctctaggccctgggatagagcagcgaatgagacaagttctaacccacatcttgccctaggcacccagtttgagtcacatctgaatctccaagtgcctgacacaggtcttgcccagaaacccatgtcaggcaataccagcgaatgaacagggcttgtctggctgtgtacacagaggctgttgcctccctgttcaacctgacaaacacctcccaaaaccccagctcctgcccctcctgccgctcctgctgcctgggatattttctgggcacccaactcctatgcaaccccatctaatgccacctctgccaggaagccttcctccagcctcctaaagctgactcagtccctcctttctttggtagtccctcattgtgggaatgactgtgtccaggtctatctcctccatcagactgggaccgcctcccagtgccacctgagagcacctgactcatatctgtgcttctagaatgtaagggccagcaccatacagctttggtaaatatttatggaatgaataagtgaatcaacccatcaagagataggtgaacatcaggaagggaagaaaaatacaagctcccaggccttgaggagaagcagggaggagagtgaagacacttgaagctcccagggtcacagctcagctctcctgacctcccctccctgacctttgcaccctgttccccaccaaggcccccaactcttctgcctccaggaggcttcagggattgaccgcacaccacagcacagagggtctgactgctcctagccaagcccccagggctccctggggaggctgttaggaggtgtctggtttcccgtctgcaggccatctgtccctccacaacaggatcactggccctgctccagagggactcgaggtccattttagatcaggagttccctagggactgagggaactgctctgcgactcactgctttaggtggccctctaacatcctgcaaaaccctcttgtaaccctctctgaatgtcagcatccacagcgaatagctgacacagctcagagttactgagcggctccctcactaacaatgagtgctgacaggccacggacttggccactgtgaagagcatggctgcctggcatgtccagcctccaggccagccgcttggggaagcctcctgctcgccaggccctgtggatcaccccctccctgacctcctaaggcactggaagcccattgtgcctggcaggagtcagcatggtgcagcagagagggcaccagctccgagcctgacactagctctgccggggactcactgtgtgacctgcttccttaccctcaaaagggggaaataagacaaagctcacaagggtagccgtgaggtctaaagaatgacgcttggaaagggcctagcacagtgcccggtgcagaacaggcaatcaataaatacttgacatacaaaggcccctctgcctctgatttggtgaaatgcaggagtggcacccccagggctacaggacaacgtccctgtctggtgcttgggtactgagaggtctggagcttcagaacacagaggtcaagactcaggctctgaaggattagagacatagcttccagtcctggctgtgccgggtgcttgctgtgtgaccctgggcaagtcgcctcccctctctgagcctcagtttccacaacttcaagatggacactgagttggcattgttgatacatgttgttggcaagggtggcaaaacaactgttctggcaatcatgattcatcaggattgaccagagccagatactgtgcaaagagctgggttaaatctggccctgagggcagtctgctccctccctgctctggcagcatttaggatggtagcaccttgttcacaacctggagttgctgcgtgcaggaatcccagcccccactggcctatgcgctgtgccagccaatgcatccctccacctcacggtgggagctaggactgggctcagggcagcgccactcccaggcccccatctagggccactcaccaggatggttgtgaccaccagggtcttgttggccagtgtctgcgacaggttgatgtccagggtggtggcattcatggccagggtgcggttagagtaccacaccccaatctagggggcagagagggtgctgtcagctcaggccctgcctgaggtcatggcagcctctgggcccgcccccaccctcaccccagcagggctctggcgtcaccctgggtctgctcacctcacggtggccctgccgggacttttctaggatgcgcagggtgtagttggttctctgccctttgctgttgaactcgacccgcccggtcagcccatcatactctacctggcagggtggggaggtggggcagagggagagtgcaggggcccagagatgggcagggaaggcccaacgtggtgagacatccacagagaaaggcacagacagaccggggtggaggggacaagagagagaagaggaagatcacagtcaaaagagcaagataacatgcaaggaagcaagaggagatgggacaaaaggcatgaagagggcaagactcagaaagagagagagagagtaacccagataggcagcaacagccaggagtggacaggggaggcagtgggtacggtgggaagagcagggagggcagagggccacagggtggtcacagtgagcgctcccacctgaggtggccgtgtcctgcctcctccacccatccccgctcgggctcaccatgcgcaggtagttcatgaggctggtcccgtggggccaaatgttggccgatgtacaggccagaggcttcacaccgatctcctggctgcggttcagctctcggacagcgctcaccaccacgtgcacggcgtcaaacatcagggcggctgacagctgcggtgggacagaggcgggggtgggatggataagaggctgcctaggcagaggagccccaaaggcccctgagctgccaccctcaaaccctcaaataacttccctctccccaggaatgggaaactgggtgggtcaggagtgaggaagtggctctggtgtctttcttgggaagtggaattgacagcggggaaggtgtgtgtgcttcccatgtcttggtgggagtaggtctcccagaatgtatgtggccatgtatctctcagagggtgcctggatagctagctgtgtcacctgcatgggcaggtatgtctgtgaatctgggtgatgcaggccagggaagatggccatagtccccgtctgagtgtgtctggggcacgtttacatgagtggggctggacgaccatgcccattcatctatacacagcttgggtgtggtgtcagagaggcaggagcatataatgattggtcgcgggcctgggaggcaggtggctcagagctagaggcctggctctgctattttctcattctttgatagggctaagtcctcattcctccctgaacctcagtttccttctctgtaaaatgaggataatagtaatctctaccttcatgtgctgttacggggctccggtgacataacgcctgtaaagcactcagaacagtgcctggcacacagttagcgtcccatacactctagcccccaatctgtgacacaaccacggtgtctgtgtgtgcttgttagggtgtgccccagctgtgttagtgtgaaggtctgagtatctgtgttgtgtagatgtgcacaggggtacacacaaatgtgcctctgtgttggggtgtgtgatgtccctgtgtggacacatctgactggacagcttggtgtccatgtgtgctctgcgcgtagaagtgtcttggtgtcttggtatctgagtagatgtctgtgaacaaatacacataaatatgcatcttttgtatgctggtatttattcaacatctattatcagacacctgttatgagctaggctgttttaagtgctggggatacaatggtgaacaaaataaacagaaccccctgccctcatggaacttacagtcctcaaatccatatctctatgtaagtctaatatacagtaagccacatcgtgatgaaataagcaaatataagtgctatggaaaaagacaaggcagggaggggtgaaaaaataggtagtttaccttttttttttcttttgagacagagtcttgctctgtcacccaggctggagtgcagtggcacaatcttggctcactgcaacctcttctacctcccaggttcaagcgactcttgtgcctcagccacccaagtagctgggattacaggcatacgccaccacacccagctaatgtttgtatttttagtagaaacaggattttgccatgttggccaggctgatctcgaactcctggactaaagtgatcctcctgcctcagcctcccaaagtgctgggattacaagtataagccaccatgcctggccaatttacttttttttttttttgagacggagtctcgctctctcgcccaggctggagtgcaatggcacgatctcagctcactgcaacctccgcctcccaggttcaagtgattcttccacctcagcctcccaagtagctggattacaggcacctgccatcatgcccagctaatttttgtacttttgtagagatggggtttctccatgttggccaggctggtcttgaactgctgacctcaggtgattcacctgcctcggcctcccaaagtgctgggattacaggtgtgagccaccgcgccgggccaagtttaccattttttaaacaggaggaggaaggaaaaatcttatacctgaggggacactggagcaatgtcctagtgatggggagcaagccactgcttctctcggaaagtgcacaggaagcagggggaagagggtgtgcagaggccctgaggtgcacctgcttggggcatcagaggcacctcgaggagctggtgtggccagagtggtgtgggaggtagagagagaggaggacatgggtccaatgcatcacaaggccacaccacgaggcctcagggagggcgagagggttctgagcatgatctgagtgaggtctgaaagggggccccagaagtatctgtgcagagtgtttctgggtgtgactgggtatctgtgtgctcaccgcagggcccaggtaggtgctggcttcacagttctccctccaggacatgttgaggctgcggacaaactcagggtagaaggggtgggacgtgttgaacatggagaagcccaggatgttggaggagtcctccacaataccgtccagatgcaggatggggaagtcctgggaccaggaagaggtggtgaggcctggggctaagccctaatgggacagctgtgatgggaaggaagtgggggcagagatgggccagagggcatacacaccatggtggtgaggatgtacttgtaaaacgctgaggtcattcccagttccgaggcctggaaaacacaggaggcaaagaggcagagtgagagacagagacccacaggcagagatggggaggactcaagagaagaagagagatttagagacagccctggtgagaagacactccatgggaaacacagtaaagtaataaatgctcagagatagacagacagggaggaggagacaagtgggggcatagggaggccttagtccctggtgtcccgccatgctgactgctgtcccaggtgggacattttgctagaggagagattttgctagaggagattttgctagaggagagaataggactcccaaatgtcccctgtctctcatgaaggcacttagaagatttccttctggagataggcaagaagaagcctcagaaatagggcaggaaggggaattatctttttttttttttaaagacaagatcttgctctgtcactcaggctggagtgcagtggtgggatcatagctcactgaagccttgacctctcaggctcaagtgatcctcccacctcagctcctgagtacctggaatcataggcatgtaccacaatgcccagctaattttttaaaaattgtttttttgtagagatggggtcttgctatggtcccaagctcctggcctcaagcaatcctcctgccttggcctcccatggtgctgggattataggtgtgagccaccaggcccagcagagaggagagccttaattttaagccctacactctccaaaagccaaggttgggctgcaaatgtgtaggactcagcctaggcataaggtcagaaaatcgattccctgcaatctttaaaagtgctttgcaataatagcagccagtttgaacgtcaagattcattcttgagacccttttctcataatcctcgaggaaaacaaagctggaaaaattcttcctgccagaagcacccaagtctgtccccccacgagaattataacattaaagggcaccagcttgcatttcctgggtggcaggagttgggctctcatcacgtgggtgtcagggaagggcaggcttggagagggaagagacaactgttcacacggctggcacgggaggggccgggatcccagcccaggcctgcctggctcccaaacctgaaacctcctccttaagccatcctgtctcaagaacccagtggattctgttcacacttcctgcgggctacagtcagcagtgatatatgggtttgtttgtttgttttttgttttttgagatggagtcttgctctgtcacccagactggagtccagtggtgcaatctcagctcactgcaagctccacctcccgggttcaagtgattctcctgcctcagcctcccgagtagctgggactacaggcgcccgccaccacgcccggctaattcttttgtatttttagtagaaatggggtttcaccgtgttacccaggatggtctcaatctcctgacctcgtgatccgcccgcctcagcctcccaaagtgctgggattacaggcatgagccactgcacttggctgacatatggttttaattaaaaaaaaaaaaaagtagagaaaaataaataatacaaatttggttattggccgggtgtggtggctcacgcctgtaattccagcactttgggaggctgaggcaggcagatcacgaggttaggagttcaagaccatcctggccaatatggtgaaaccccgtctctactaaaaatacaaaaattagccgagtgtggtggcaggtacctatagtcccagctacttgggaggctgacacaggagaatcacttgaacctaggagactgaggttgcagtgagctgagattgtaccactgctctccagcctgggcgacagagcaagactccgtctcaaaaaaaaaaaaaaagaaaaaagaaaaaaaatacatgcaaaaacaccttaacacagagctcaataaaaaatgtttaaaaatccttcagagctacgatgtagccagatctgactcggggccaggcactgccctgcatactttacctgcccctgcccacagccccttctctccccatcactcgctctctgggcttgagccacactgcctccttgctgttctgtacacaccacagtcttgctcctgtcctgcagcctgaacgctggctgttcccttagcctcactcattaaccctcacaacccaccgagcagggactattcacagggagatgcggtgactgctcaggaccacacaaccaggaagcaggcaggctgagagacaaactttacaattatcatcttcacggaagaagaaggtcttgaagcccccttttgactcctgaggcccatgggcattgggtgacttgctcggtcaccccaagtttctggccccagtcctttgggaaatcagaggtaggggcctcaccttacggaggatgaggtgggagatggaggcgttggcgtcgatgatgatggtggacaccttgtcatcacggatctccttgagcagtggtgtggggtcccggctgtcgtccaacatcctcactgacagcgtctccttggagatgaggaagccacgcaccagttcctccaatcgcagcaggcctgagggaggggtggggccttgggttggagcccttctgggtacccaggcatggcgtagacactctctcctcctcaacatggggcagctgggcagaggactggagggtgtgcaaggacatggggcagctgggtcccatggggtaatgggcttggggacccaaagcctgggccctccccaattaaaatcccaacctagacctcttcctagaactccagattcctgtctctgccaccttcctgacccctcattgggtgtcttgacaggtatctcatgcttaatctccttgctcaaccaccacggcttccccatgttggtgaacagcatctctagtgtgccagtcgctcaggccaaaactctggcttcctctctttcacacccaatccatcaaggccctcccttccaaacacatcagatcccctcacgccgtgccactgtcaccaccctgtcctgagccaccaccaactcctgcctgctgcaatccccaagcctgcccctgagtctgttccctacacagcagccagaatgatacgggtcagatgtgctcctcctctgccccaaaccctcaaatgccttcccagctcagtcagagtcctagaggccaaagtcctcacagcctccaaagccacacaatctgcccaactcaaccccttgttactgcccagactgcgggaattcaagaccagcctggccaatatagtgagaagccatctctttaaaaaaaaaaaaaaggtacttgttgagcatgtgctctgtgccaggctctgctcttggtattgggggtcagctgtgagtgaagcagaccaggtacaggatgaggagatgagttgggcaacaaacaccgcaaataaatgcattacatggttagaaataatgagttctatgttaaagcagaaatgagttatgaagactgggagtctagtgtgggtgtggggtgcaactttaaatgaaatggtgggcgggggcctcattgagacactagagtagagactgatccctaatagcctaatatcaagagccaggcctggcacatagcagctgctcaataaataccttttttttttttttaaccatccagcccacagctcctcctctccccatcactcactctctgggcttgagccacaccacctccttgctgttctgcacacaccatagtcttgctattgtcctgcggccttcacgctggctgttcccttggcctagaaccctctcctctcacatccttacacagctccctccttcccctcctccaggtctctattccaacatcaccttctcaatgaggccctcgcccaccatttcatttaaagttgcaccccacgcccataccattcttcataagtcatttctacttttccatagaactcactacttctaaccatgtaatgcacttatttgtggtgttttttgcccaagtcctctcctcagaatgtacttggactacttcacccacggctgaccccaataccaagatcagagcctggcacagagcaggtgcttaataaatacctttatttatttatttatttatttttttgagacggagtctcgctctgtcgcccaggctggagtgcagtggcgtgatctcagctcactgcaagctccacctcccgggttcacgccattctcctgcctcagcctcctgagtagctggcactacaggtgcccgccaccacacccggctaactttttgtatttttagtagagacggggtttcaccattcacaggatggtctcgatctcctgacctcatgattcgcccgcctcggcctcccaaagtgctgggattacaggcgtgagccatcgcgcccggccataaataccttttttttaagagatgggatctcgccatgttgcccaggctggtcttgaactcctggcctcaagccatcctcccaccttggcctcccaaagtgctgggattacaggcatgagccaccacacctggcccaataaatacttcttgaaggaggaattccttctagaggctatggagcacagttcctccttgcctcaagctccatacccacaaatccaccagcctaccagacatctcacatgaatgtctcaaagacacaccatgcccgacgtgtgccccgatgaatcgtgttcctccttggcaaaggccttgcaccatccctagccccaccctcttctttccctcacgcctctcacatcaccctggccccctcattccaactgccaccacctgggcccagaccagtgtcgcctctcccctgcctttcacttgtctccttgccacccctcttgtcactctccagcctgttctctacactgcagccaaagggctcttcctagaacacgaatctgaccctgtcccctcgccctgcccggcgtggggacttcccatggctcccatcatctcttgcttcgttgttctcacatttcagccactgggagtatctgcaagcctcttgaagggctgtgctccctgggccctctacctctgcccgtcacactttctacttagaacctgttccctctttcttcccacacccttcaggttcagcttggatgtctctttctcatagacacaggctctgaacctcccagatggattaggatccctcctatgtgataccagaggctccacgtgcctcctggcagcacacataccactctgtatcacaacagctcaatgaccaatgacctccactagaaccggagttccaagcacccagggaccacgcccagggcctagcagagggccttgacatggcaggtgcttagtcaccatctggggactaaatggatctctttggggagagaaggggtctgtagaaccagaggcctcggtttctgaagatgggagaagagcctggtgcctgggtgccccagggttctaactagggggcagtgaaccactgtgtgggacaccagatctcttgggaaggggtgtctgggggaacagaaaacaaaacattcagttctccctcacactcagccttggcgcagatgaggctggccgaggggtagttgaaggacttgaggattcgggagaccgccaagctgacgtcctcgttactggggtacaggctgacagacgcgaagcgaaggtactgaaggcggggtgtctcctcgggacccaccttgatgtgggggatctggacagagaggaaactttggcctccatcctgcttctccgcccagccctcgcctcccagggacccgctccccacaaagcgccggcccacactccccatctcacctccttctctccacagatatggctcacggtggaggcagatgctgggctagaggagggcccaaggacagacacaacccctttgggtaagatctgacacactgcgtgggaaggggaagagaccgcagagtcagggaccccctgcctcctctccttccccatccctcagggagccgccatggcccaggagaggatcagacactggcaactgcctgatcctcttctgccatccgggacccagaaggccagtctctgaccccacccaacaagtgaacatgagggggcatgagatggagagagatgaggacacagcaacagagggacaggtcaggccaagggagatcaaaggaagggatgaagagaaagagacaccaggggcctcctctgcctacaaagcctgtgcctagtccctcagccactgttgttctcaaccttttcagccatgccacaacccacggtgcactcaccacctcctcccctgaccccacagcccaggtcccctggagccttcccatactccaaacaccactctcccactgcacttacttcctcctctttcttctgctctcttcctccttatacacatgtgtgtctcaagactgggaggtggaaagctgttgtttttgcttgtccagtgcctgttctcatggcagaaccctaacttctcctgggggaactatcctcacccttcagtccagggttcccaggattgactggcacctgatgcaggccttggggagtcacagaactccattcttctagccatggcaactggttcagaaatacatatgggtgcaaatcagaccatggagcaccttccccaggtcttttgctacaattatcactgggtttgctaaactggtgagatgtaagcttggtgctgctggggccatctcaccaccagttgagagagcatttctgaaaatgaagccaactcagaggaaagcaggcctcagaggtaaagacacagagattcccaggatgtcatctgaatgcctgaatccagccatgcctgaaacaatcctaggccatcgtttgaacacctggattcagccatgcctgaaatttgtccttaggtcttttagtgacatgagctaataagttctcttttttccttaaaccaggctgagtttggtttctgccacctctaactaaaggcatcataactcaacacctcatttcctccaaactggctccttctggaccttccacactggtaagggccccaccattcacacagaccagatgcctggaaatggtccttgccttcaatctctctcctgacagccagttagtcaccatgtcctgtctcttctttgtcctcaaatttctcacatgtatccccttctcttcaaccccttggcccctgacctagtttaggactctcaactcagacatatatcagagtacacactcatcacccaaatccagtctccagattctctttccagaagcctcactccctggtatagacctatcaatggcttcccagtgcctgtgggtgaaggtggcatctttcaccctggcactgtagcctccttgagccagcgtgacaatctgcacagcctcgcttcctactaccctgtcacacttagctctgaagtatctcacaatctctccaaatatgtcctgaatccaggtggattcaggatgggctcaaccccatacccccccatttcttggctccaaatacttccctctgctcccaccccgatccccacctcatctccagactctaggcacatgactggaatgccatctgcctcctcaccctccatcccagcttctcccaagttgtactctgtgccacatcagccaaaaaagcctgtgaaatgccataccccattcttcctcttactgatctgaaacatacacgaacaccataaagcctctgataaggcctgcaggaaagaaacctgtctaaaacatgttttaaggcagcatctcccaaaggtctaactccagcacatctgttcaagtgacaccttcgaacattcagcccatcagtattccatagacacttccacacccctgtgatgtggccggccgtgcttggagccacgccactctttctacatcctgttcacctttcagagctcagtttcagactagccttctccagaatgcctttgctgaccctcgcccaagcctcctgccctccatgcctggggcttgttattaagctctgggggctaacaagcatccccagccagctgggatgatagggcttatcttttcaacgccgccccgtgctcctccagagcagaactggggcttatgctctccctcctctccaacccccaggcccagcagcagccatgtctgggaagaaggcagagacaaacacaaagaagggggaggatggagctagaagaggacaaggccaggccagaggccaggggcagagggatggactgagggccaccgacctgccctgcctcaccccacgcccccatggccccgctcactggtgtccgtggtctcgtactggctgtcccgctgcagctcaaagatgtctacttccactcgggccttggctgggacctcgatgatcccgttgatctgctcccgggccaaggccaaggccagacgctcaccgcggccacacactgtctgatcatccaggattgcagctgaggggacacatgggttggggaccagactcctgagtcctgaggaaggagggggctgtggtcttagactccagggctctagggtgaggtgggtatacggaccaggggtctagacacctggatctgaggttggtgggagctaggggtctggactcctgggtcctgggggaaggaggaactggaggctgggattccttgctgctgaagagagctgagacctggaccctgacggactggcatgcctgggtccccagaggagccccagggcctgaggatgcaggggcagggtgcgggagggcctcacccatgcgcagtgatgagagcacctggcagctggggctggcgaaggcaacaatcagcagcagcagcagctcagccggcatcttcctcccctcctcatggggacgcagctgccgcggcccccactcgccacctgcagggagaccccccagaccaaggggagattactatgtggtgggatggaaccccttggaggcctgctggatggggtggtcacagaagccttggggacattgttggcaagcagttcacagctctgcagagccctgctctgtttagaagctggcaatactgagggcattgcaagaagggaagctcagctcagaggggcactaccagggtggaggtcacagtgctcaggcgctgagtaggacaggctgcaagagagaggatgggcacagctaccaaaacaggagggaggcgtgcgaggttctcaggtaggagtgaattcctgggaccagccccacccaaataggaaaccaggaagtgccaccccccacccagtcccgcccctgtctctgggcaggcagccgttactaggcaacagaaaccggctggagaggatgcggtggttgctaggcaaccccatcccaggcctcacttgccactttcctaacatccccagttcccacaatcccatggggagagaggcctggacatccgaggtctggaggagagagtatctgggagttaggaaacttcgggagagatggagagatggagaaaaagagagagaggcacacacagaaccccatagatgaatggacccagagcagtaaaagggggaaaaaaaaaaaaagcaaagagagagaagggaggaaacagagaaagtgaaagagaggcttagagaagggaaagacagagagactcagaaagagagaaaggtcaaaatagatagaaatacaagggaagagaaagacaagacaataggaaaatgggggtagaaatggagagaaaagaggagagttacagggaggcagggagaggactaggagggagaaagagggaagagacaggaggatgaggaggcaagataaagaaaggacagagcagggagcggaggaaagaggggcaggctggaggtggggaaaccaaggcacaggcgagacacaggaagagggagacagaggatggagaaaagataggaaccgactcggatacaagcaggaagagctggaagggaggagtgagtaaggcagggagtggagctgcctgccagaagtgggtgccataccactgccccccaccctactggggagaagaagtaaagggggagatggtgcatctttgctcttcacaactctccacccctaaggagtcagggattcctctaggcaccccagctttctgcagggcaaccactgggcaaggagtttggccagatgcacagctccacttcccctggctgagggctgtgccccacgggaagggatgcttgggtttccatggagtagggttactgtggggggcacagaatgctgtgaagtgggcctggacaccggaccccactcagtccccatggaaggacagcttgagctggtgaaactgtggaatgagaacttcgagggaaggatagaggcacaagtccttctcaccatctcaagtggcctgcaaaacctaggctggggatcagtcccagctctgcccctgactcactgcgtgatcttgagcaagtcactgccttctaggcctctgagaagaagagagtgctaggtgggagggtatgctggacaggctggggactgcaaactataatgtggattaaggtgaaggcttgtcaaggatggaggcacaagggatgctgggagacccggaggagcgctcagagtgggaggagtgtgaagggcggagctaggagagaggcaggagtggagtgggtcatcctgagacaccagggactcctggggcaaatcagggagcagaggacaaaggacagaaagaccgagggagagatgggacagaaggacagggacccacaggtggcagccaaaggtgggagcagacagagaaagacagggttgaggggcagcaggtggacacagagatacacacagaaagacagcccaagacgtaggaactgaggctaagtgagagagcaagagacagacacagcctagaagtgagacagcaaaggagacagagacagggcaggtagggtgtcaggcaggtccaggactcagccccagagactgggcaaagccagataaaagtcaaaacccagcagagagctgagcaacagtgggcataggagagacatcagcaaaggtgagaggcaaggagggccagcgaaggcacacagggtgagggagaaggcaaagggagataaagaaacagcagcaggtacaagacttgggagaaggaaagaaatggccaaactctacaaagagagagggccagtcggaaagagagacagtatgtcggagctgcacgacaggcccatagaagaggaaggggcaagggggaaaagcacctgggagagagaaagggggagtcagggagggaaactgaggtggggagatggagtgagtgcactagaggggcacaggcagggacagggcaagcacctgcaggagaggccagacccacacagaggcatagccaccccaagacactcaggaatgccgtgtgggggagcaggagatcctggggcctgaaagcccccagacatggagaggaatgggagcagaaaggccacgcgaggtaacacagaagtcgggagagagaatgggagtggaaagagccagaccagccaggaaaagtcagcatggaccacggagaggtggggcagcagctgaggagggagggactgaggagccgggcacccagagtggatctgggggaaagaggtggaaaagtgacagagggaagacagcctccaagctcagaggcagagagagggaggaggacaggtgagcggaggcacagaatagaaagagaaatggaaagagacctgccgagggagacttggaaagagggaagccagggtggaggagttctgacagagagagggatctaaacagagacatgccgagagcaacctgggctaacagcaaagagagaagttgggcagagtcagagaggggcccaagagacacaggaaatgggggctcaaaagcggaaagacatatccaggagatagagactggacggggtggggacagggccaaggcccaccgcaggcagaggatgaggctcagaggaacagaaagagccagtctgggaccaggacggaggcttggagacagcaggggcacggacatgccaggggcccggggtaagtgagagcccaagtaagagcaatcagccccgtaggaccccagaaagctagagggccaggggcggcagtgagctatgtacccagaagaagaggtgagaagaggtcgaggtgaatggacgctgaggagatggagggcgcagagcaggcccctagtgggggagggtacttgccagtccggagaacggggagaatgtggtgcccccctgccaggcggcaccagagcccagccttccaggacccagaacccagcccaatccctgccctgcagacactcacggatcctggtgggacggagggctgggctccctcgaggcccgaagaccgacagcgggaggtgctctggcgctgggtggtggtggggctgggcggggggagagggcagtccacagggccccctcccccgccgccggtggtggctcccaactaatccaaaacggtggctccacaggagcagggaggaaggacaggtggaagaggagagggcgggccggggaggggaggaaggggaaaggagaaaatggaggagagaaggggagagaggagagggggaaggagcaaatggaggggaaggagggaggaaaggaggagaggaaggtgaaaacggaaggggggggcacaggcaaagccgggggagggggaagctggcccaggaaagggcccccgccccctcccctagccgggccggcctgggggggccacagggggcgaggactgggtggagaaaaggaagccggccatcaggagaagtgggggaggggagggcctgctgggggagggggccgccccctttccccctcccccctggagcctgggccctgccctggttgaggcaagggcccggagtcctcaagccctcagcccccacgggaaaagcatgctgggggcggggagagcccgggagtggagagctggggaggatggagagctgggagacccggagaggccaagaagggggcaaatgaggtggagagatagggaggagggagaggaggatggagaggagcaggtggaagagaaaggcggaggagggtggggtgtcccaggggctcccggtgctgggcctcagtgggagggcctggcgacacactcctggtcccctgtgaggagccggctccagtccccggctccagtccccggctgggcctgcctccctgccgctggctgccgccaccgctcagtctcccctccgaggccgccgcctgcctgcccgcctgccgcctgcgctgggtcctggagcgcagtggggtggttcaggagagagagaagagggagggagggaggcagggaggagggcgggcaggaggaagggagggaggcaggcaaagagagagtagggaggtgagtcgggggagggggagcctgtattggttggggctgggggccccccgcgaggagaatgctgatgagaagaaggagctgcattggatggaaggcccacccccgagccaccccctctaccacaccatgccaccgccctgcccaggcagccctgggcacaggagcccacagagatgagaggcaagaagacccagggagaaggccactgagatgaggggagagggctacagagatgaagagaaatgaagagaagagagacagccgtcaagactgtccagagaagtgggctgaggcccacaaaccccacaaggacaaggacaggaaaagcccagggataagaaagaaaggcccatggagacaagggagcagcctacagagacaagcaaaaggacctcggagacaaggggcagtaatgtggacatagagacctcccgcgaaggaaaacgggagaagccagagacacaagagagaggcccctggaaacagaaagcactcctcagatatggggagcggtccacagggcagggagagagccaaggagagccgaagaaggtcacagaaacaagggaggcctacagacaccagggtaccaaaaagacaaggatgtggctcatagacacaagagagccactgaggcaggagctgccagcctggagatgcggggcaagcctcccccaatataaatagctcctatagaggtgaggggatgggtggtgagtatgagaattccctatagtgcacagagaaatccttgggacccacagagatgagtgggtggagagaaggggccctcattctctagtcacaggagcagagaggcagtgggaaaggtggatgggacaaggagaggaagctggagggcagagccagaagtgggagactccttcccagggaacaccctgcagcctctcagaaggagctgagcaggacagggggatggaagagagaagcgacacagatcttggagtgggggtgggtggtgcatggctgggtggggggtgaaatttggggggaagaaacatgacagttggcgccgaaggctgagcccgtgactcaccaccacccccgatgctcgtgatggggaggagacactgacacactcacgtgcggcccacagcatatgtgaccgcatgcctcgaacacacagctggcacatggcaactcctggaccacatgccagcccagcacaggaagccctctgcaagctggcatgtggggcatcctggacacacatctgacacatatatctgacgctgaaggaccaccaactttgcacacacctccttaccccacttggtcaacatctacaccgccccctcaaacatccacacttaactccagtcaggcctaaaagcccagattcacacctgcctctgggactttgcttatgaaggacctcaacacagaacaccatcctttcgaccagggcggtggctcattcctgtaaccccagcactttggaaggccggggcaggtggaccacctgaggttgggagttcaagaccagcctggccaacatggcaaaaccccgtcactactaaaaatacaaaaattagccaggcccggtggcacactcctttagtcccagctacttgggaggctgaggcacaagaattgcttgaacctaggaggcagaggttgctgtgagccatgatcatgccactgcactccagcatgggagacaaagcgagactccatctccaaaaaaaaaacaaaaaacaaaaaccaaccaccatcccctctaaattcaacctgtcccggaaatcccagccagtcctgcactaccacctccagaaagacctcagcttatcctcagcttattcctatatgatctggagaaaagagacctgcaccacccaaatcaagttgagaagtccaagcaaaaggcctgagaagttacctggatcctcaaattttctttttttttccttttcttttttttttttttttgagatggagtctcgctctgttgtccagactggagtgcagtggcatgatctcggctcactgcaagctctgcctcctgggttcacaccattctcctgcctcagcctcctgagtagctggtactacaggcgcccaccaccacacccggctaactttttttgtatttttagtagagacggggtttcaccatgttagccaggatggtctcgatctcctgacttcgtgatctgcctgcctcggcctcccaaagtgctgggattacaggcgcaagccactgcacccggccaggttttcttttcttttattttttctttctttcttttttttttttctttagatggagtttcgctcttgttgcctaggttggagtgcaatggcgccatcttggctcactgcaacctccgcctccggggttcaagtgattctcctgcctcagcctcccgcgtagctgggattacaggcatgcaccaccatgcctgactaattttgtatttttagtagagacggagtttctccatgttggtcaggctggtcttgaactcctgacatcgggtgatcggcctgtctcggtctcccaaagtgttgtgattacaggtgtgacccaccgcacccagcctgatcctcagattttcaagtggggaaaaggaggtttcagcagaagcaagaatctgcccaaggtcacacagcctgtcaaaaactgagcatggcttccacttctctgtcacctaccccaggtgattttgccctaagggcaaacccagactgcttcagagcaggccgagcctagctttagctcactaatttccaccaactctttcctccacttcttgcattcaacccttcaacatgcaaccacttgaacttcctgcctggcaggcaggtgagcctgggggccaagaatgtagactgtaaggtcaactcctgggttggaatcctgactcttcctaactatgggaactacgactagttacttctctggggcctcgatgttttgtagagtcagcatgacagtttctctctcatagggttgttgagaggattaaactgagtaatgcatgtaagcattgagcataatacctagcacgtcataatacactcaagagatgttagttattattattaggctcccggagatactaataaaaataacaactggccagacacagtggctcacacatgtaatcccaccattttgggaggccaagacaggaggatagcttgagcccaggagttctgagaccagcctgggcaacatagtgagaccctatctctataaaaaaaaaaaaaaaacccgggcatggtggctcatgcctgtaatcccagcactttgggaggtcaaggtagatggatcaacttgaggccaggagttcgagaccagcccagccaatgtggcaaaaacccatctctaccaaaaactaggaaaaattagcagggcatggcggtgtatgcctgtaatcccagctactcaggaggctgaaaattgcttgagcctgggaggcagaggttgcagttagctgagatcacaccactgcactccagcctgggtgacagagctagactgtctcaaaaaaaaaaaaaaaaaaaaaaaaaaaattagggactgggcgcagtggctcacgcctgtaatcccaacactttgagaggctgggtgggggggtggatcacctgaggtcaagagttcgagaccagcctggccaacattgcaaaaacctgtctctactaaaaatacaaaaattagccgagagtggtggtgtctgcctgtagtcccagctactcaggaggcttaggcaggagaatcacttgaacccaggaggcggaggttgcagtgagctgagatcgtgccactgtactccagcctgggcggtgggcgacagagtgagactccatctcaaaaaaaaaaaaaattaaattaaattttaaaaataggccaggtgcagtggctcacgcctgtaatcccagcactttgggaagccaaggcaggtggatcacgaggtcaggagattgagaccatcctggccaacacggtgaaaccccgtctctactaaatatacaaaaattagccaggcgtggtggcgagcgcctgtagtcacaggtactcaggaggctgaggcaggagaatcgcttgaacctgggaggcggaggttgcagtgagccgagatcgcgccactgcactccagcctgggcggcagagaaagactctgtctcataaataaaataaaataaaataaaataaaataaaataaaataaaataaaaataaaatgagtaactcctagatgtcttttactctctgcctcacatgagatgaaatggggctcacatgaaatggggctgttattagccccatttcacagattagaaacttaggctcaggacagttgacttgccctagaaccaggattccaatccgggaatctgttttaactatacatgcctggtgttagggaatttaatccatgagaaggttaggacatctagtgaccaaatggccatagaattggccccgggtctcactgtgagacgcatcccatagtggcttcaggtaagtaaataaataacacaattctgagagtcagtttcctcatccgataagttgaaattcctctgtgtttgggttcaaggagtaggtctggaaatgtttcttttcttctttcagatggagtctcgctctgtcgcccaggcgggagtgcagtggcgtgatctcggctcactgcaacctcggcctcctgggtgcaatcaaatctcgagcctcagcctcccgagttgctggggttacaggcacgagccaccacgcccagctaatgttttgtatttttagtaaagatggtagtttcaccaggttggccaggtgggtctcgaatgcctgacttcaagtgaacccgcctcagcgtcccaaaatgttgggattgcaggcgtgagccaccacgcccagcctggaaacgtttctaacagtactggggcaactccctcccaaggccctgaggggcgcaggaacgaggtgagtaggaatggccagagccccttggacacatggggccccaatctcgaggtgtaagggtcagagtcaccccggaaggaggtggagtggagtccgcccgttaccggctcacttccttcaggctctcaccccgattgtccttcaggtcctctacccaccacactccctatttcttccaatgaaattgtccctgcttctttttctccatatcctcgctctccttgcttcccctatgacatttctcctctctccacctcccaaaagtcccctcggtcttttctctgtttcttcctgttgccttcattcccctccttttaataaagtgagtctggaaccttggtttcccttttctctctccatgtgactggtgctgcatgcagtttgccctctccccatcgcgctaagtggtttcactttctccctctgaccctcggggaaaccacaaaggttcccgtgcctccattcccccgctccagccctcaaggtgccgcgtgcctcaatttcccaggctcttttcctccctctccctgtccccaacgctgactccctcacggcgtccccaaaatggcgcccgcggccgcgctccgccgcctaacgtcatcgcgccgccctccgctcagagttcccctctggagccgtcggaggcggagtcgaggaggaggaggagcatcctctaaggaggattaaaggggcgggcactatccacccgagggctgaccggtgagggaacgacgctaaaggattggttgggcgctgcggggaatctcgacgctcctcactattggcccaagcctcagagacatgaacgtcgattggccgaacggcagggcccgagcgggcaatgattggttgcgtccggccgtccgtgcggcggccgaggaggaaggtgggaggggcgttgctgagggtagctgggggcgagagcgaggctacggagcaggcgagaggcgacggcgagagctagagcgggcgcagcgttagggtggccgtgcaaggggagccgtggcccgggcccggggcgtgcgagacggcggaagcaggtgagcgcgagcgggcgcgcagaggccggccgggctgcgctccctgccgccgcggcctcctcttgccaggtcgcctgcgcactgagggcctgagggggtgcgcgccgggcagttagggcggagcggcaccaacggccgacccggcgcgcgggcagccgggcgggggccgggctggagcggcgggtggggaaggggcctggagtcgcgtgcggggctgagtgaggaggggcggggctcgggctgaggctttggtggggcacctgggcgggaaggggaggcctcagagctgtcccaagagggctccgcggctccccagggtttggggtaaaggacttggtggtgtggcaagtccaggacgaaggggctgggccggttagacggcacgtgggtgcccagttaggggcttagggcgtgagaaagataattaagttaatgcaggggaaaaatatctagttcttcctggaaagaattggggcggtgagaggggttttggtgtgaagacattaggaaatcgatatccccaagggaacggtttagagctaaggaggggtccagttgtaatggatggggttaaattaatgtgaagaggccttaaaccaatgtgtcaggaggttgggtacccttggaatgcgtggaaaggagtctttgtacaaagaaggattaagtgtattttaaaagggtgtctgggtgtccctagaatgagctggggaaggtagtcttttttaagtacaggtaattaggccaaggtgaagatgggatttggttattggaaggggaggaagtagggtgggagagatctgtgtgctaaagtgaggggtgcctgggaattcctggaatgagactgagaggttgctaagacgctggggggtctgagtacccccagaataggaggctggtgagaggggcttgagtgtgaggaagaggggtctgtgctggattaaggtggtgatggaggttctgtatgagaataggaggtccgggtatccctaaagggggtttgggcagcacgaggggtgtgtgtaaaaggagcttaagccattgtgaaagatgggtgtgtggatctttacacaaagaagaggagttatgttgctacgaagaggagggtctgagcatccctagaatgggttagggtgggttgggtcttctagcaaattaaaaaagattaggttaataatgtggaggaggatctggatattcctgagatggatttgagggggggctctgtttgcaagagaggcataggttgatataaaatgagggtatgggcatccctgaatgagtggctgtgtatgaacaggaagggtttaaatcaatgggaagaggggatctgggtatctcagaggggattagaattgtcgatttggtcttggtacaaagaagaggtgatgaatgtaaagagtggatagataccctggagacaggagctagggtggtggaagggcctaggtccgaagcggggaggagtaggcttttgtgaaaatgggtctgggtattctggatagggggttagggttgtaggagagggccttgatttgtagaggaggttaagtaattaaacagggctgcgtatcatgaagtggttaaggtgggcaaagtctgggtgtggagatgggttaggccagtgtgagaaaatttgactggggggaagggatatagtttgacgtgaggaatctgggcacctgaggaagagttggtgggtagcaggggttgcgtgtaaaggggaggggtggcaccttgtacagtgctgaaagtggagtggtggggcattgggcagtttgagtggtctgagtgtaaaaagaagtctgagaacctgggagaaggagcagaggccatgggaggggtgtggctgggagaaacaggtggggaaggcctatatggggtttcagttgggtaccttggagaggaatggggtgaggtgagttggtaagaaaaggagtcagtggaaggaggtctgagtggaggttcccatgtgctgggcggaactgtggggcccactgtgaggtgtgggagatgaggggactggacaggttacaaggatctggtgggtggagtttgatgcaagttgatacagaggtgagactgtgggtaaattcctggggaagggactgcctgggagatttgtgtttggtgtttgttatgctgaggggaggaaggattattgggagggaggcagaattttaaaaatcgaaggaagaacttaagggggtgtagatctaaggtattaggagtggagagtgatgaagggaagagctgaggaatcggtgacctaactggtttgtccccactgtctcctcttccagcccagggccttgctgccgccatgactgaggaatcagaggagacagtcctgtacattgagcaccgctatgtctgctctgagtgcaaccagctgtatggatcactggaagaggtgcttatgcaccaaaactcccacgtgccccagcagcactttgagctggtgggcgtggctgatcccggagtcactgtggccacagacacagcttcaggcacgggcctctatcagacccttgtgcaggagagccagtaccagtgcctggagtgtggtcaactgctgatgtcacccagccagctcctggagcaccaggagctgcacctgaagatgatggcaccccaggaggcagtgccagctgagccatcacctaaggcaccacccctgagctccagcaccatccactacgagtgtgtggattgcaaggctctctttgccagccaggagctctggctgaaccaccggcagacgcacctccgggccacacccaccaaggctcctgcccctgttgtcctggggtccccagttgttctagggcctcctgtgggccaggcccgagtggctgtggagcactcataccgaaaggcagaagagggtggggaaggggcgactgtcccatctgccgctgccaccaccactgaggtagtgactgaggtggagctgctcctctacaagtgctctgagtgctcccagctcttccagctgccggcggatttcctggagcaccaggccactcacttccctgctcctgtacccgagtctcaggagcctgccttacagcaggaggtgcaggcctcgtcacctgcagaggtgcctgtgtctcagcctgaccccttgccagcttctgaccacagttacgagctgcgcaatggtgaagccattgggcgggatcgccgggggcgcagggcccggaggaacaacagtggagaagcaggcggggcagccacacaggagctcttctgctcagcctgtgaccagctctttctctcaccccaccagctacagcagcacctgcggagtcaccgggagggcgtctttaagtgccccctgtgcagtcgtgtcttccctagcccttccagtctggaccagcaccttggagaccatagcagcgagtcacacttcctgtgtgtagactgtggcctggccttcggcacagaggccctcctcctggcccaccggcgagcccacaccccgaatcctctgcattcatgtccatgtgggaagacctttgtcaaccttaccaagttcctttatcaccggcgtactcatggggtagggggtgtccctctgcccacaacaccagtcccaccagaggaacctgtcattggtttccctgagccagccccagcagagactggagagccagaggcccctgagccccctgtgtctgaggagacctcagcagggcccgctgccccaggcacctaccgctgcctcctgtgcagccgtgaatttggaaaggccttgcagctgacccggcaccaacgttttgtgcatcggctggagcggcgccataaatgcagcatttgtggcaagatgttcaagaagaagtctcacgtgcgtaaccacctgcgcacacacacaggggagcggcccttcccctgccctgactgctccaagcccttcaactcacctgccaacctggcccgccaccggctcacacacacaggagagcggccctaccggtgtggggactgtggcaaggctttcacgcaaagctccacactgaggcagcaccgcttggtgcatgcccagcacttcccctaccgctgccaggaatgtggggtgcgttttcaccgtccttaccgcctgctcatgcaccgctaccatcacacaggtgaatacccctacaagtgtcgcgagtgcccccgctccttcttgctgcgtcggctgctggaggtgcaccagctcgtggtccatgccgggcgccagccccaccgctgcccatcctgtggggctgccttcccctcctcactgcggctccgggagcaccgctgtgcagccgctgctgcccaggccccacggcgctttgagtgtggcacctgtggcaagaaagtgggctcagctgctcgactgcaggcacacgaggcggcccatgcagctgctgggcctggagaggtcctggctaaggagccccctgcccctcgagccccacgggccactcgtgcaccagttgcctctccagcagcccttggaagcactgctacagcatcccctgcggcccctgcccgccgccggggtctagagtgcagcgagtgcaagaagctgttcagcacagagacgtcactgcaggtgcaccggcgcatccacacaggtgagcggccatacccatgtccagactgtggcaaagcgttccgtcagagtacccacctgaaagaccaccggcgcctgcacacaggtgagcggccctttgcctgtgaagtgtgtggcaaggcctttgccatctccatgcgcctggcagaacatcgccgcatccacacaggcgaacgaccctactcctgccctgactgtggcaagagctaccgctccttctccaacctctggaagcaccgcaagacccatcagcagcagcatcaggcagctgtgcggcagcagctggcagaggcggaggctgccgttggcctggccgtcatggagactgctgtggaggcgctacccctggtggaagccattgagatctaccctctggccgaggctgagggggtccagatcagtggctgactctgcccgacttcctctttggcacctccattccctgttgctgaaggccctccagcatccccttaagcatctgtacatactgtgtcccttcctcttcccatccccaccaccttgtaagttctaaattggatttattctctcgtgaggggggtgctctggggtccttgacacacataaaggtgcccccccaccttccacctcttagcactggtgaccccaaaaatgaaaccatcaataaagactgagttgccagcagtgtgtagagtggaatttgggagtcatgggtcttacctctcgtggctgcatcaccaacacccagaagtgggcctggcaggtattaggggtagtaggagctcagtaaacatttgctgggctgaagagaatgacctggtgttcatgggcatggctctcatagcagggccttcacttcactgctagatggaggtagcatggctctcttgccactagaggtcccatggctctgtggaaaagctcaagagtgtttgtactggtggcaggaactttcagagaaatcagatttttacactcctgtccctgactcctggcctgatgtggaccttgtctcccaaggccatctgattttctcattgatccccaagagcaaatgcaggtaggcatgatctctagagctgtggaattaaaggagattctgaataatatgtgtctggatgtaggaagattcatgagaggtggtgacttgaattcccctggagttggactttggctcagccaacagatttttattgtgagtgatggattgttgggatggctggctaatgtttgaacatctagtcagtctcaagtactatataactgaataatattcacactgattacgtgagaacattttgcagggaaggaatctccagtcaaaagcattgagatgacttgcccaaggtcacattcaatccaggcagggcagagcttgaatttaagcctgatttcatttcatttggtttaatcaccgatatgcttttctctctactctgttgccttctgcatactttggggagggtggtagagacaagatgggagtatgtgactggtgggatgctaggctgctgtgctagccttgcttctgagacccccccccccaaagattattccagatctttctgttgaactctttttcctttttatttttgagttggagtctttgccgcccaggctggagtgcagtggtgtgatctcggctcactgcagcctccacctcccaggttcaagcgtttctcctgcctcagcctcccgagtagctgggattataggcgcgtgccaccacacccggctacgtttttgtattttcagtagagacggggtttcaccatgttggccaggctggtctcaaactcctgacctcaggtgatctgcccacctcagcctcccaaagtgctggaattataggcatgagccactgtgcccggcctgaaagaactccttttttaagacagggtctcactgtatcacccaggctggagtgcaatggcacgatctcggctcactgcaacctccgcctcctgggttcaagcaattctgcctcaccctcccaggtagctgggattagagctgcgcaccaccatgccaggctagttttttgtatttttagtagagacagggtttcaccatgttggtcgggctggtcttgaactcctgacctcaggtgatctacctgcctcagcctcccaaagtgctgggattacaggcatgagccaccgcgtctggcctaaaacaaattctaataattgttcttgtaaaataaatgacataacatttgaaaagttaatgtattagggttctgtttatacaaaaaaaaaatcaggttatgtgcgtgtgtgtgtatgtgtgtatcctacctgttatatgtatataaattacacaatagatacagtaaataatatatatgtatataaagatttttttatagtttgttttactctatagacatacaaacatacattttaatgtttatatacatatatatagttccaaatcctaggatttggagtattctttttaattaagttctagggcacatgtgcagaacatgcaggtttgttacataggtatacacatgccatggtagtttgctgtacccatcaacctgtcatctgcattaggtatttctcctaatgctatccctccctagcccctcaccctctgacaggtcctggtgtgtgatgctcccctccctgtgtccacatgttctcattgttcggcttccacttaagagtgagaacatgtggtgtttggttttctgttcctgtgttaggttttatttttatctttttattaaaaatggggtcttgctgtgttggccaggctggtctcaaactcctggcctctagggatcatcccattttggcctcccaaagtgctgggatgagaggcatgaggcaccacacctggcctgtttttttctatttttcagagtctcgctctgtcacccaggctggaatgcagttgcacaatcacagctcactgcagcctcaacctcctaggctcaagtgatcctgtgatcctcctgcctcagcctcccaagtagctggaacgacaggcgagcaccaccacgtctggctactttattttgtagagatggcgtcttgggttctgtttggttctgactgtgccaccttgaagatgggcctgaaccaaatgatcttcctccatgtactatttttatgtcccatccctgttgatttgttttgagagttgaggggctttgctttctttgtcttgccaaaacactgcaatgctgacactttttgtcttactaaatatgaaacctgtctttcactctattcctttttcctgtgcctcagttcccccaaccctcactatcgactttgcaggatcccagcacctgtgtgccaagcatacattagaggatggaacagtgctgaggaaacgcaacagcttttttttttcctgagatggagtcttgctctgtcacccaggctggagtgcagtggcacaatcttggctcactgcaacctccacctcccaggttcaagtgattcttctgccgcagcctcccaagtagctgggactacaggcgtacaccaccacgcccagctaatttttgtatttttagtacagacggtttcaccatactggccaggctggtctcgaagtcctgaccattataatgatccacctgccttggcctcccaaagtgctgggattccaggcgtgagccaccatacctggcccaattttgttcaatttttgtagagatggggtctcactgtgttgcccaggctggtgtcgagctcctgggctcaagggttcttcctgccttggcctcctaaattctagggttacaggcatgagccaccacacatagcctgttttttttgtttgtttgtttttgagacggagtctcgctctgtcgcccaggctggagtgcagtggcacattctcagctcactgcaagctctgactctgggttcatgccattctcctgcctcagcctcctgagtagctgggaccacaggcgcctgccaccatgcccagctaattttttgtatttttggtagagacggggtttcaccgtgttagccaggatggtcttgatctcctgacctcgtaatccacccgcctcggcctcccaaagtgctgggattacaggcctgagccactgcacccggacttttttttttttttttttgagatggagtctcgctctgtcgcctggtctggagtgcagtgacacgacctcagctcactacagcttccacctcccggattcaagctattctccagcctcagcctcccgagtagctgggttacaggcgtgcgccaccacgtccggctaatttttgtatttttagtagagacggggtttcgtcatgttggccaggttgatcttgaactcctgacctcaggtgatccgcccgcctcggcctcccaaagtgttgggattacaggcatgagccaccgctcccggcatttttgtttgtttttgggtgttttttttttttttttttgcatttttttggtgatgtgaaaaaatgacatataactcttctgttaatttatttgactatttgtgaggttgaaactttttaatgtgttaattgaaactctggttttaaagagtctctttagtcctctggggaagcatccagggatggaaatggagaggtatttgctggtttcctggctttctcatagttctcatatattgaagacagtgtgctggagctcagtcctaagcactttacttagaccatcatcctacaaccttgtgaggtaggtattgtcccttatttacagatgaggacacagaagctcacatattgaaggtcatatatttataaaatggcagaactgagatttgaattcagaagtatgaattcatcctaaattcaaagacttggttctttggcaagaacatttgtgcaggttttacttccaaacattcactattttttaaaatttaattttttttgtttttgttttttttgttttttagacaaggtctctctctgttacccagactggagtgcagtggcacgattacggttcactgcggccttgacatcccgggctcaagcaatccttccacctcagtctcccaagtagctaggactagacaacaggcacatgccaccatgccgagttgagtttttggggcttttttagagaagagttctatgttgcccagactgtgaacattcactattggaacagaagtaaaaccctcccctccccagcatacagatctccaaccccacaccctgatttcttcaccactcttcccaggacagagaggagaccaagggagagtaggcatcatttctctctgtacagtttttaattttttattttttgatgtttgttgttcagatgaatgacacactcaagttacaaaaatggggccttaaaagaagcacattgtacaatgaacaagcagattggagttaagaacactgaaacactaacccgctaccacgagaagagacggagggggtacaggaagggaaggaaggggctaccaacacaggggtcagacggaactgaaagggaggctaacttggtaaggatggaggaaaggcaggtctactccagggctgatttctggatgccggttcctgggcacccttgccttgtacttgccaccccctccaacttcacccacccccattccaacctggtcattctgggtggtgaaagacacccacaccagaatgggctgcgccaatcaggtctttaccaagtagggtggtcaccttgccctagtgcagccctggatttggaaggtgatggtggaagcagtgggacaagaggccagaaaggagttgaaagttcaggcccctgctcttcccaaagactcctcgcccattccccaccctgccattatccaaaggctctctacgagttgccgagagaggcccccagtcaccctgcaattatataaataaataaatactgagcccctgggtttgggggacatattgggggaggggcagcaaggatagaggacaggaaagagaggaaggggagggaggcagaagggaggggtcacagacatagtaaatagttgtctccatcccagcaacacttctctctggatttttctctccttttgtttgtttaacaaggagctaacaattcaaggacaaatacttaaaaatatacattattttttctttgtttccgcctttgtcatcgtcgtcttgctttggagactgctgaggtcaaagtttaaaccgcatgaaggacttgcggcttggagtttttgtgtatttttttttatttttatttttaattttttttcactttttttccaacatataaaaaggtagcggagttgtctgtgggtttttttttttttttaaatggttaaatctttggtttgtttcttttttctcttggaggcctttatctctcgcacttgcctttcccactcagagaccagtgggggcccgcgtgtctcaatcttgctgtctgtctcactctctctctcactcaggtccccctaccctgggctagaggaagagagaggcaccctggtgttcatgtgggttagaaaaactagtcaggtcaagaggtcaccctgacttggctagtccctcgccagatctccccagggcttggagagcccgtcatggccttctccagggagatggatggaaaactcatatccttcccctcctcctgatctcagccccaactcctactggggcttgggttccccatccctacccacccccacacacacacccaccccaccccccagaagagaacagagagaggtggtttagttactggcatcaatttttttttttttttttttggcacaatgaaaaggcccaccattagggtagacccagtctctgtccctcccttaagtaggaggtcagggttggggagaagagaaattcagagggctccccactgctccaacccactcatctctcctctctttctagcccaggcccttggcccccaacctcggacatctaacctagcccatagcctagcctggggttgccctccccatcccccacataaagctccccagccctccaactctctcgctcatacacagacacacggacacaggctctgtacagaccacaaaataaaaacgatgagatagttttgtttcccggagtcgagacgggggaccagagtgtaaggggcagatgggggtggggggcatgaattcccccatcaccttcccaaccctggctccctccagccccccagccccttgccctggctggcccccagccaacgatatttggtttcctttttttaacattaaagttctatgaggtatttggtgccttatctcgagtcctcaggggaggggggcccagggggagacctggggctcacctgcccctccctccctcctacccccttcccaatatttggtttcacagctgtagttaaagcttgggatttggttatttttccccctcccaggaatttttttttcttgtttttcttttcctaggtgtgagggttggatggggagggtccccagcacccccggctgcacaggggtccctccaccaacatcagggcatctgccccatccctgccccctgctcctcctctcctctttaccccactcccacatactggggtggggagaggtcccaggtggtgggacttgatggggaggaagcaggatgaagtgggtggtggtgagtcctggattttctttccttttttttttttttttttcctttttggtctagaatcatagtttttgtttgagtcatctccaccatgccttccatgctgcctgtcttctcggagggggtttttggttgtaattcctttcattttgctctgctcaaatgtccttcctatttggtcaggagcccttggccccctctccacccttgggctggggcccaagccctcttgccagtcccttctctcttcaggaaataaacatggacaaactcagaggtagggtaagggcagggagtcgttcagcggagatgcttacattccggtgaggttgggtagacgaggtgccaggccccatcgtgccggggtgggaggggcggctacttcaccactgcccggacaaggcacccagaggcccctgcaatggccgagtctctgctgcctccgtcgcccagcccaacagtttcatttcccgggtgggagaagggagacaaggaaaaaagagaacgctgaggcctggagctccatctgcctctcctcagagtgtccggcagaaagtggaagctgcccaggccaaagccctgcggtctcagggctctcctctctctctgctcctgcccaacaaggggcaggggccacactacggctgtcaggccccaccctgatttcaatggctcgtgtccttcactgcaacactttggtttgaggagagacacagaaagaacaagattgagagagaagagaggagagcaaagggagagagaggagacaggaaggaggagaggagagaggaaggaggggaggagagaggaaggaggggaggagagaggtcagacaaaagagaaccgaaaaagaaatcaaaggaggaatcaaaccacccaaaagttgttaagttttccttcatctgttctttttgctttcttactcctttttttcctgtctttttttaaagctttttcagttgatttgggaggggagtttggggctcttcacccctgtccctgataccctctctcagccccgcccacccgcttccatctgccctggccgagggacaggccctgccccagccgccccctccggctttcccaaagacaacgtccatgaggtatttgtgaagagaaagaagcatccgtccttccatccgccttggggaacaagggcctggaccaccggtgcaggggcttggctccgcctcgcggttccatcttattcttgaagagtcctcatcttctttcccttttatatatatatatatatatatgtttatatatatatataaattttttttctagtttaaatttattgtttgtttgtttctgtttttttggttttcggttcaaaactttgttggcctccacaatagcaggagggcagggtggctcccagtggtgtctctcctctgtccgtcgtcagtggagacgtgtccggggctggtcaaacacagggtccagccaagagttgtggaggtcttgtgggagtggtggccaccaccgcgccctctcagatggggaccacaggctgtggcactgtccccaccacatggaccctgatggggatgccatctcgaggaaccccaccactggggtgtgtgcgtgcgtgcatgtggggggagggagaggcattcgccagtaccagaggggcacagggtgggaaaagcgaggtgagttctctttttggtttctggttaatgtcaaagaacgtgaaggatcccacggataggcactggaatatgaatttttttttttttcagggaaacagacaggatggaaaaagacaactgaatgccctcaactgaatgtcttcatcccctcttgcctgaaatttccaccttcccataggctggggagggagtcagttccagagcagaggagggtgacagggttgaggagggacttgtgagagctagaacttggcaaaatggcctagcccacccttcaaaggggaaaagagggaggaacaggggatgaaaagttgtccgcaggccttcccttgaactctcccctgctggggggagggaggaggttaaagcaagaccccctgcccaggtggggagagctgggggccaggggagaaggggacacatggtagggacacattctgttgagcacaatgctaaaaattctgtacatcctttggatgaagctactgaatatttggtgtaaggttgttcaggccctttctctttcaccttctggaaaagaacatttggtgggtggtgctaagccccagcccatctgcccaggctgtgccctgtcttcgctggcccagggctgggggctgggattaggaagctggcatcttctctttttccttctgtagcccccacgggggaggcagggttgggggttggtcccacagccagggctcggtggcatgaggtctgacctgctggaggcttctccgcccctggctggggtttttatttggcgtcgtagcagtgagggtgagcacgctgaggtctggctcgcgactggttttttggtttgtttgattttgtgggttttttttttttttggtttgtttttggtttttttttgtttgtttttcacctctggttcctttggggcagctggtttctgttgtgattatttttggttttctcttttgttggttagtttctttcctttttttttttttttttggttggttgtttttttggtctttcctcccttgtcactcctgctctgaggaccctctgcgtccccaccactggcctcctcgccctcttcccaggcaagggaccaaggcagggaccagaggaatgggaggggaggcatggctggccctcactcaggtttggaccctgcctcgggcccccctggacctccaggggtctgtgctgccgtctcgctgcaagtggaggaggaggaggatgaggatgaagaggatgaggaggagaggccaggagacttgctggagatggaggctgccacagccgcagccgctgctgagaccaggcccacaccaggcggggtgctgagcaggggcagcccagcatgattcaagaagagcggcgaggtcaccaggccagggctccccggggctgcaccggctgcccccagcaccagattcccgctgccatcaaggctggtaaggggcagggttccaccagaggccagggctggcggggagagagagaggctgggctaagggcatgccgggccaggggagacctttgccttccagcatcctgcccagagtgccccccatctccccatcggtcccactgacccccatcagcacccctcacaccttccccaaaggtgagatgggtatgaagaggcaagcaatgcagtgagcaggggcaggatggcatggctggagcagcaatggcagggctcgaggccccagaggatagggctggtgacgatgggtgtgacatgaggcagcacgcaccttggatagtggccaaagggttgttgctcatgagggctggactcagcccggagctcaaccccaccattgtgcttctgcaagaggcaaagcagaggcattagcaggggcagggacctgccaacataactggggtgccgctccccaccctagaagcagcagcgaccctgcttctccccacagcttcccacgtgcacccacttaccccgtgctggggttcaggcctgacaagccgatagccgagtggctgccttgagggctggggtttgtgctgttggtggtggccgggggtgggggagtgacagaggggatggaattgagggggggcgcagccccgcccccgcccccaccccctccagctgtccggctggggtggagcgtccccacagctgaggataaggtagtaactgccagagagagacagaaagatggggtcttcagcttccactcgtcccccactgaggaacctggggtcagctcctacttgtcctcccgcccagctcacgcagcatctcctcagtcagaacagccttagacctccctgccctctcttcccagagtcatttccctgtgcctctgccatggtgacccctgtcataacaatggaagtcagagcaggtgcttcctgctgagccctggcactctacactccctgccctgaaccacttttttaccgactagaaacgggggtgcccaggagacaaagccctatggctccctctaggggctggggaggggcgaagggtgccaggcacactgccacatctgagggatgggcaacctggcaggggctgagggcccagactcagccagactgctggggtagaaactcctggctctgtctcatcccagtggtgcccttgggtgagtgccttaacctctctgaccttcagatcccttgtctggaaaatggggataataatagaccctatctcataaaatgagtttgagaattaagtcagtcaatgcagtttagaaagagtttagtacagtgccaggcaagcacttactactttataaatctccacttactattttctagcctggggaggggcaacgtgttgttttatgtgtatatatattatgtgtatatatattatgcatatatatattatgtgtgtgtgtatatatatatatatatatatattttttttttttttttttttgagatggaatctcactctgtcaccaggctagagtgcagtggtgtgatctcagttcactgcaacctcctcctcccggattcaagtgattctcctgcctcagcctcccgagtagctgggattacagacacacgccaccacgcccagctaatttttgtatttttagtagagacagggcttaccatgttggccaggctggtctcgaactcctgacctcaggtgatccacatgccttggcctcccaaagagcagggattataggcataagccaccacacccagcgaattttatattattattatatatatggtgtataaccatacatataaacctaccgtgtcccaggaagagggaggggaactctggatacaagactatgtatgtatgcatgtatgtgtgtatatgtacatacacatacactcttacatacatgtatttatatctttttatgttttacacattcataataatttaataaaaactgaggcttagaaggataaaataagtgcttgaattcacacagcttaaaaatgacagaggccaggcacaaaactcaagtgcctcaccttttaccaggcccatgcttttctcatatgaaatcgtgaagcagattaaagctgagttgctcctgcagaggaggggtgagtcctaccctcttcccactgtctctcccattcccccacccacactccccaggcccagtcttgaggcccatggacacccagagccacttgggaacctcaggctccagcctgtgccacatcctcccagtcccccctcaccattttctgccctccctgacctgttgtgctcagactgctggaagcttgggacaacggtaaggtccccgcgcccccttggggtgtgacctgaggagagaagaaaggaggtgtggttagccactgtctgccagcagcccccgtgatgctccctgtaggaccccactcctccgtcccaggatgggggcagggggctttggcacaatgctgcatttgtattattccacatgctttcttcacacttgccctagctgatcctgagccacaagcaggaagggctaattctccattgagaacactccccacctctcttctgacaccgccccatctggctagtctttgcagggttgtgtcctgtctgaagtgactgcaccggaagagtggctgctccacatgctcctgatattgttggttctgcaaaactaaaactcttttccctggacaagcaaacaccacccttttaccagtggggttggcaagcaatgcaggagagactgttcaaagtgacccaggcagggaaagagcagatctaaagtgcgaggctaaatggatgcatatctttgcatcggggtgttgagatgtcatattacttgattttctgggaccatcagcttccttcttggccaccccacctccagtctcacctttgcatcagccccagaaacctcactaaatgtgactctctccttccccagctcaaaaccactccttacctcctcactgcccatggttcaagttccagctcttcactgtaaaacttggggtacatgcccccactccttccccaacctcattcatataaactgcagcaccaaccacactaaattgcactggagtttctcaaattgggctgggcacaccctggcttctaggccttagtacacactggtccaggaaggctctttgccttcttgtggctggctaactctcccttgtcctttagaactcagttcagacagtgcctccttcacaccgatgggggcaggggctcctctctggagcatcacagctcttcccagaaatggaaataaaaggatgggataaaggatgtcccagctgtgtctgatatcaagtgggcctgtgtatagctgtggacctgagagtacacccatgggtgtgacaatttccccgaacggcaaataagtgcctctccctgcctctgtgtggttgtgagcctgtgtgttctaacctggaccacgtccctggacatatatcccttcctgtgtggctatggcactgtgataactctgtgtctggctatgtcggtgtgtatctaggggtgcttgtatcccccatgtaagaccacagttccctggaaaccgtccctgtgtaactgtgcccatctacgtgatggcctgtctccaagagtgactcttcttgtctctgttctaggctctgtggacaaccaggtagggtgggcttcacacaggtgcctgcggagctctgtggtctccccaccccccaggcgggctcttggtaccatatgggggctgtagctggccggcttccctgggctgggcagcatgggggccgcactgcaggggttgatgcgtttctccttctggcgccggttgcagaaccagacgcggatcacttccttctccatgtgcagctgctcggcgatcagcaggatctcctctgaggtaggcttctggttctgcaggcagagggctcgttagcccgaggcccaccgcccgccacccctcaggtgagggccacccaggagaggggggcctcaccgctagaaaactcttctctaaggcgaagcggacgtttgtctcgatgctggtcctcttcttgcgtctccggccgggcaggccgtcgaaacccaggctggggctgctcagctggttggggctgggcaggcttgagtccacagacatagtctctgtgcgccgggggagacgtgagcatgagaaggggcctcccgcggccagcggccactgcccgccccctacgcgggaaccccagcctggtcccacctgcatcgttgagccacttctccaggaggggcttgagtttgcacatgttcttgaagctcaggttgagggcctcgaagcgggaaatggtcgtctggctgaagtcgttgccgtagagcttgcccatggccaggcccacatcaccctgggccagtggggcggggaagggcccgaagtcagggtggggccttccggcactgggcccgctccgcccgcccactggccacgcccctcgcggcatctatcaactggccacgcccccacgcccaccgcccagcctgcaaggtgcctccagacctgcgtgaagcccagcttgatgcggcgttgcttgaaggtgcgggcgaattgctccagctcctccagatcactgggctcctcggggtgggatggtggctccaagcatttggggggctgcgggtgcgagaggtgcgggtcgggcagcgtagggcgggtcacggcctggtggggtgggcaggtgggtgggatgcagggcggaggaccaggatggggctcagcgatgggtgcacagtccccctcccgccctcttcgcccctgcgttccatccgccgcctgcagactccccccgccttcctccacaagcaccgtcaatccctttaaaggtccctccacatgcactgttaatccctttaaaggtccgactctgctgccctacatgggtttcctcattgcctgggactctctgcactgtcccttcacgcctgcgaactcccagaaggagcagccagctttttgtgccagggctctttccctggagctggaggcagtggttcatcctcatctcaacctgggaatcagggactggccctgccaccaaatcactgcttagcccaggcctcactttccccctctgcaggatgggaacaatcactgctgttctgtctacccagtggggctgttgagagaatcgggttaaaaatgagtaggtcgtgcagacccatggactgtacaatgccaagagtgaaccctaatgtcagctatgaactttgggtaatagtgatgtgtcaatgtaggttcatcacctgttacgcttgtaccactctggttggggatgtagatgatgcaggaagctgtgcatgtgtaggggcagagatagatgggatatctctatatcttccactcagttttgctgtgaatctaaaacagctcttaagaaattaagtcctaagcaatgagtagattgcaaataaagtaaaagttaagaaaaaaaaaaaaggactgggagggcaattagagagatttacaaaaaagcaacagctctatctgggattcttcattgccctaacaataaaggatatgaagcaggtggtgggtacagggatgtttgtcgctcaggtcctttatccattattctccaaaatgctggggcagatgtttaggaatttttcagttttttttttttttttttttttgagatggagtttcacccttgttgcctaggctggaatgcaatggtgcgatcttggctcaccataacctctgcctcctgggttcaagtgatactcctgcctcagcctcccgagtagctgggattataggcatacgccaccacacccggctaattttgtatttttagtagagatggggtttcttcatgttggtcaggctggtctcgaactcccgacctcaggtgatccacccgctttggcctcccaaagtgctgggattacaggggtgaccactgcgccctgcctttttttttttttttggtataaatttaaggacagccgagtgcaatggctcacacctgtaatcccaatactttaggaagccaaagtgggaggatcgcttgagcacaggaatttgagactagcctgggcaacatggcgaaaccctatctctacaaaaattttaaaaattaaccaagcatgtggggcgtgactgtagtaccagcaactcaggagggctggggactgcttcacttgagcccaggaggctgaggctgcagtaagctgtgatcacaccactgcactccagcctgggtgacagagtaagaccctgtctcaaacaaaaaacaaaatgttaaaagatacaagtgcaattttgttacacaaatgtattgtgtagtgatgaagcgtaggcttttagtgtatccatcacccaaacagtgtacattgtacccattaagtaatttctcatcatccacccactctcacccctctcaggttttgttgttgttgttgttttagagaccagtcttgctatgttgcccaggctggcctcaaactcctgggctcaagtgatcctcttgcctcaggctcacaagtagctgagactataggcatgcaccaccgtgcctgtttcagttttcagaaaacctacataggcagccaggcacagtggctcatgcctgtaatccgagcactttaggaggccgaggcaggtggatcacctgaagtcaggagttcgagaccagcctggccaacatggtgaaaccccatctctattaaaaatacaaaaattagctgggtgtggtggcgcatgcttgtaatcccagctacttgggaggctgaggtaggagaatcgcttgaacctgggaggcagagggtgcagtgaactgatattgagccaatgcactccagcctgggcaacagagcgagactccatctcaaaaaaaaaaaaaaaaacaaaaagaaagaaagcctacataggatgtatatcatagataatgtggcccggcccccacccccactagggtcaagaatattactccttaatcagatacagtaacagttttgcagcagcaaaaatgccataccaagagggacaaagaaaagtcatacactggcttatatcatggcagggcaggttttgcagtcaaatgagttctcatgccaatggtggaagaacaacttgactttctgagcatttgggatttcagaactgcagttaagacctgtattagtctctaactcttcagtcagtccttctgaaatagttcacatatatttttttaaagggctataaaaaatgggtagaaaaaaactttgaaattcataaaaggtagtgaaaattatcattaaagtctagaactcaggcagcaaactgaaagaaaggcctcggggtccaggtgccaaggtggcctggagagctggcaccctctctaaggggcctctgctcctgccagtggccaggccaactgctcactgcgccaagccaccacgtagacacaggtacagccctgccagattttctggtttatcaagaggagctggaaatgtggtgctttctgggaatttagttgacaatgaccaaataaaagacacctgtgggccttgttttcagtctccagtctgggaagtggatgtgaaataatcacctaacgaatgccttgttcagagaatcctccgttgcagtgctggaagaggcccgaggcatttgcagcctaaaggcttgcagccccttgcaattttgtgtgtttttacacatgagcattttgggggaatggggatcagatctaaatctttcatcatattctcaaaggagctcatgtactagaaagggttaagaaccacttgtctgggccagctcccctcattctatagaggaagaggctgacccagacagggagatgggcttgcctgaggtctcacagcaaatcactggcagagtgtggctgggtcaaatggaaaggagactctcactcatcccccacccccgtttacccagctttcagcaggccttgctgctggcctggcctggtgcactcaatggacagtctcacctgtgtgggaagcccggcccggggctgggaggtcagaagagctccctgggtttgctgaggtagctggaatagatttggtgtcggtagcaggcctggaaagacaaggggaaatacacagggtgagggggaggggaaggtgaggaagttctgtggaggcgtcagggaggccatctggggtgggggccttacctggctggctctgctgggcctgcggtagcaggaactgagcaggtggctggaggtggtggcctggcacaagcaccagctgctggagctggaggagctgctgtatgtcctggcagggagtggggtggacagaaagatagcctgagtcctggctgggtttcatcctctctgcatcacctgaaccttgaggggctgaaaccaggaagctgctccacatggcgatctggcactgggcagtgagggatcgtccactcggtctctgaatggcatccctgagctaagggcacccagaggcttctctctaccatggggtaccagagagtcccaactgggcagtcctgggagggctcactctttatttaccctttctttcttttttttttttttttttttttttttttttgagtctcgctctgtcgcccaggctggagtgcagtggtgtgatctcggctcactgaaatctccgcctcctgggttcacgccattctcctacctcagcctcccaagtagctgggactacaggtgcccgccaccactcccagctaattttttgtatttttagtagagacagtttcaccatgatagccaggatggtctcaatctcctgaccttgtgatctgtccgccttggcctcccaaagtgctgggattacaggcgtgagtcaccgaacccggctaccctttctttcttgatgaaatattttccttgttttaacatttccgcagaacaaatagaatcatttaaaaatgtaagccaggccgggtgtggtgactcatgcctgtaatcccagcaatttgggaggctgaggcaggcggacacacctgaggccaggcgtttaacaccagcctggccaacatggcaaaatctcgtctctactaaaaatacaaaattagccaggtgtggtggtacacgcctgtagtcccagctactccggaggctgatgcaggagaattgcttgaacctaggaggcataggttgcagtgagccgagatcacgccccttcactccaacctgggtgacagagcaagactctgtctcaaaaataaataaataaataataaaattgtaaaccagaccaggtctttcctcctttaaaaacactcctggctgggcacggtggctcacacctgtaatcccagcaatttgggaggccgagccaggcggatcacgaggtcaggagatcgagaccatcctggctaacacagtgaaaccctgtctctactaaaaatacaaacaattagccaggcatggtggcacacacttgtagtcccagctactcaggaggctgaggcaggagaatcgcttgaacccggaggcggagattgcaatgagctgagatcatgccactgtgtctctgcactgcagcctgggtgacagagcaagactctgtctcaaaaaacacaacaaaacaaacaaacaaaaaacactcccaaggcaaatgatttcatgtctggaattagctttaaaatactccagcaaatagtgtaaattagtacaaccactccgggaagctctttagcactgttataggttgcagtgtctccccccactccctgccaccccccaaaaaggtaagttggaatcctaacccccagaacctcagagattaaccctatttggagatagggtctttggcagatgatcaagttaaaatgaggtcattagggtgggctctaatcctatatgacttgtgtccttataaaaagggcaaatttggacatagacatggataacgggaagatgatgtgaagagacacagggaaaagacagccacgtgcaagccaaggagagaggcctggaacagatctctccatcacagccctcagaagggacagatccttccctcacaaccctgctgacagcttgatttctgacttccagcctcagaactgtgaggcaatatatttacctcaagtcacccagtttgtggttctttgttttggcagccctagcaaactaatataggcgctatctaagaaaactggctgggcttggtggctcatgcctgtaatcccagcactttgggaggctgaggcgggaggatcacgaggtcaggagtttgagaccagcctggccaacatagtggaaccccgtctctactaaaaacacaaaaaattagctgggcatggtggtgggtgcctgtaatcccagctgcttgggaggctgaggcaggagaatcgcttgaagccgggaggcggaggttgcagtgagttcagattgcgccactgcactccagctcgggcaacagtatgagactccatctcaaaaaaaaaaaaaaaagaaagctgaacatacaccacccttaggacccagcaactccactcctgcatgtaacccaccatacatgtgtatgtgtttaccacaagacatgtactacaatgttcacgtggaccatttgaaataggcaggacttgaagatagcccaagcgcgcacaacagtagaatgggtaaagaaactgtttcagtggaagctacagcaatgagaatgagcagtccacaagtcatggttacatgccacaacgtagacttcccaaacataatcagtgagagagctagtcatgacagagaacatcctgtacgattctaatggttgaagtttggggagtaaagactgaaaagggacaccagggggcttctgggagctggccacattatttctagatctgggtaccagttccatgggtgtgctcacagctgtatacctatgatttgtgcacctttatatatgcattatattttaataaaagtattttttaagacagggccaggcacagtggtatgtgcctgtaatcccagcaccttgggtggttgaggcaggaggactgcttgaggccaggagttcaagaccagcctgggcaacatagtgagacccccatctcaaaaaaaaaaaaatcttgtttgtatagtggtgagtaaaaaataaagtaaaataaagggaaaaaaggggggatgaggtagggaaagagggaggggaaaaaaaatccaatcctccacccaccaaaaaaagtgaggggtttagatgaaatcctatttgccaataggaagggcaaaatgttgatatctattgagcttggtgaagagtatgtggggttcatgacataattctctctacttttacgtttaaacatttctgaaagaaaaagcaaaaccgctttacacacacaatccaatggcttctcatagccctcaacaatgcaaacaaaacccctcacctgcctacaagtccctttatactgaggcctgtgttcatctccctgctcatctcccactgccctatccctccttggctgtgctccagccatttagcccttttctgtttttttttttcaaatgcaccaagcttgttcctgcctcagggcctttatacatgccgttccctctcctgggcagttctacttctgacactaatgcctggatcctaacacaaagtcaccctctcagagatgccctctttgaccacccagtctataccagcccctggcctggcctccccttatcaccccatttcatctccctcacaaggcttaacaccatctccaggcatcgctcctcctgtttactcattcatgacatgcccctctcactggaacgtcagctccatgagagcatgatcttgactgtttcagtcactgctgtatcctcagtgcctagaacagcacctggcacccagtaggtgttccacatagatatgttaatgaaccaagactgatgcttcatcatttacttggcaaattttatgtaaagttgaaagctataacatgttacttacaattttttccttctgggaaattgtgggggttggcacatgcccctcaattcttcccaatgctattattcctaaagaccaatttgatgtgccaggaagtgaacaaactgggaaaatatataagcaattcaacagaaggggctcgtttctttttttttttttttttttttttgagatggagtctcactctgttgcccaggctggagtgcagtggcaccatctcggctcactgcaagctccgcctcccaggttcacgccattctcctgcctcagcctcccaagtagctgggactacaggcgcccgccaccacgcctggctaatttttttgtatttttattagagacgaggtttcaccgtgttagccaggatggtctcgatctcctgacctcgtgatccgcctgcctcggcctcccaaagagctgggattacaggcatgagccaccctgcccaggccagaaggggctcatttctttaatatacaaagagagattttgcaaataactctatataattaaagaagaagaaaaaagtagtgattacaaatccataagtaaaaaactgacaacccagtagtaatgtggctgacagacaggtctggagagtgcccagtgaaattaatgtgaacagctctggatggaaatacactcagattcactcgcaataagataaacacgactgcaattgcactgagatatcatttttacctctcagatcaccaaatataaaaatagtgtgtaataccacattggggagtgtggggaaacacacattcttgtacatgctggtgagagggtgatttggcaatgtctatcaaaattacaactgcacacagccttcaactcagccattctactgctaaaaatttatctattctcactctagaaggctgggaatggccttctagagaggtgcaaaatgacctctctagaaggctattcccagcagcaagtggcattctggcaaaagagtagaaggtagctgagcatgcagcaagacaggatgggttggatgaatgagggcagagctctacagtggaatactatgcagtcaccagcaagaatgaggagtctctttgtgtcctgacatggaacaatctgcaggatgtcctgttgagtggaaagctcaagaggcagaacagagggtatgaggtggtactgtttgtgtcacacacaaaaaaagagtatatctggatatttgcttgggtatgcatagttgatgtctggaaaaccataccagaaggccacgctgtaaatccattcatacctctgggatttgaaacatgtacctggtctgagtaaataaatatcccagtgtctcacccccacccacccaaacagtcactgctgatcaacatccctgcttttcgacagctgaacactattccctgaccccctgggggtgcctctgcttattccgtgtatggcagtggactgggtactcctgtgctcctgacctctctaactcttgctgctaatcatctcagaatccagcttaagggttctgaagtcctagcactctatcctgtgaaacaatgtccaccctgccttccctttcccagctacccccagcccagtaacacctccatggtcacctccctccagatgtggatcaactgtgaagcgggcaacacttatgcttcagggccccccatttacagtgaaccctttcaaggccccatacctaatttttgtttcaaacattgtctttttctttcaaagggactccaagttgcataatcttttggccccacaaaacgagacccacctgccctgtgctacacgtctcccaagtcaatgcatttgcttatgtgtacttttcctctgccagactgactctagcagaccagaggcatatcttattcttcgtatatccctaactcatatcggaacctggtaagcccccattaaatgcccactgaattgaatctaatgaataagactagaaatcaagtcttattaccagcatttttctgatttcctataacccttagcttgttgattaaagtatttgttaactcctgttcctccctagcatgactctcaatgaaaattcccctttcctccagaagcctagagaggtgtctgtgggtttcgttctgaatcaccagcgagaggaaagaatggggaaagtgcatcccagtttgcagaaggtctcatggtgagaagttcagatgggaaacatttaatcacatccctgtctagtttctcagaccagagacttaggggtcagccttaatcccaccttcccttcctctccccatccatccaatccatctgcaatgcaagtcttcccagttccctctacatctcttcctgtccacagtgactgtcctggtccaaaccaccatccttctaccccagaccatccattcgcccccaggcaggcagagaggggtctaaaacaatagaggtctaaatgtttttgtgccctgaattcttcagcatctgaaaaaaaaaaaaacctattgccctcttctcagaattaaaaacacataacatatgatatataggatctttcttttttctttctttctttctttctttctttctttctttctttctttctttctttcttctttctttctttttctttcttttctttctttcccttctctctctctctttctttcttttttgagatgagatggagtctccctctgtcaccctggctggagtacagtggctcagtcttgcttggctcactgcaacctctgcctcccgggttcaagcaattatcctgcctcagacttccaagtagctgaggctacaggtgcacccaccatgcccatgcccagctaatttttgtatttttagtagagaaggggtttcaccatgttggctaggctggtctcaaactcccgacctcagatgatccacccacctcgtcctctcaaagtgctggggtcacaggtgtgagccaccatgtccagccagatatatagaatttcaaatgaaatcaatcacataattatagtcatcatcactagggactccaaagggagggagaagggcaaaggctgaaaaacttcctactgggtactgtgttcactactgggtgacaggaacaattataccccaaacctcagcatccatgcaatataacccttgtaacatacctacacatgtatccctgaatctaaaataaaaactggctgggcacagtggctcatgcctataatcccagcactttgggaggctagatgtgagaatcttttgagcccaggagtttgagaccagcctgggcaagatggcaagaccctgtctctacaaaaagaaaaaaacaagaaggaggaagaggagaaggaggaagaggaggaggaggaggaagaggaggaggaggagaaggaggaggaggaggagcaggaggagaaggagaaggagaaggaggagaaggaaaattagccaggcatggtggtgcatgcctgtggtcccagctactcaggatgctgaggtgggaggatcccttgaacccaggagtttgaggtggcagtaagctatgatcacaccatggcactgcagcctaggcaacaaagggagacacccgtctccaaaaaacaaaataaaataaaataaattaattaaaatttggctgggtgcggtggctcatgcctgtaatcccagcattttggaaggccaaggcgggcgaatcacttgagttcaggagtttgagaccagcctggccaacatggtggaaccccatctctaccaaaaaaatacagaaaaaaaattagccaggtgtggtggcgggcgcctgtagttgcagctacatgggaggctgaggaaggagaatcacttgaacccaggaggcagaggttgcagtgagctgagatcacaccactgcactccagctcgagcaacagagtgagactccgtctcaaaaaaaattaattaattaaaatttaaaaaaatataggcatcaaacatattttgagtggtcataaaatcatttatgggtttctttattagcacactaagtaacaagatccagcaatagatctgatgactactgtaatttcaaagcaatcatgagtgaaaacagtgttttgagagatctgcaacaactataagagaatttgaaaatctgcgtacattctcttggtgacaaagtctcagtaccgctaatactactgttgtctgttgtctatattcatgatagagggacatgctatggtttggtcagaagatagtaaaaattgagatgtaatttttttcccatccaagttcatggactctgaattctatgcacagactcttctaggggtggtctatggagtccaagtccctgttttaaaatataaattaagccataaggcctctactgattttcatcacatttgtggtataatccagatccaggctatggtcctgcatggcctgcccaccacccccgcttacctctccttccttgcctcacacaactctaactccctaactctgatccagccccactgatctccttcctgttactgaaccacaaagaagtccccacctcatacctttgctataccctttctagatctacacagaggtggtccctcctcatcatttaagtctccatcaaacgccccctccctagagaggccttctctggccacacactcttatgaagtcttctttttcctccaacactctctattacactcttttctttccttcatagcaattatctgcttcctgcctatctccccaactacagcgggtgtcagctccaagagggcacagacttatctacctcattccccgctatatcctcacccagaaaggcacttgggcatggtgatattcactaaatatttgccaactaaaggaatgaaagaaggggagaaagatgatggggcatggtggctcgcacctatagttccagcactttgggaggctgagacaggtggattgcttgagcccaggagttccagaccagcctgggcaacatgacggggtctctacaaaaaatccaggcatggtggcacgtgcctgtagtcccagctactcgggagactgaggtgggaggatggcctgaccctgggaggtcaaggctgcagtgagccatggtcacgccactgcactccagcttgggtgacacagagagaccctgtctcaaaataaaacaaagaaaaaaaaagaaagaaaggagagaagacaagattctgggtgaacaggaacagtaagttggctcaggactagggtaagccggtaggaggcgccatttctccacaatccagcggcagcatggccctctgaagccacttgagggcgtgttacgtccgagtcagagcacaccagtcagagggtggagaaggtatagtaagtggagacaggccagagaaaagaccctggctggcatattttgtagatcagctgctctgtccctaagctttaaggaaacctagcacaagagctagcatgcctgtgaaagctgagaagggacggtaccgattcttgctcattgctgtattttgatcaccctcccagtgcaggagcctcataggtgatcaatacattttcaatgaatgaatgaggtgaaacctcaggacagactggcagtactttgccatagctgggactttggctatgactgggggcagaaaggttgatatgtggattgcaggatacatgggtgaattgcccactttcctaccagggctcagttccacctgggggagaagagaaagccatgacagtgaacttgaggagttcactgaggaggagccccagagccggccggctgcaacggcccaggtgctgcacctcactccagtgcacaggccagacggcccatcccccatggcctctcgcgcccccattagaggcctccacacaatctctggcagccaccatgactggaatggtgttggcgcatgagttgacattcctttgccatccctgatatggcaaattgtgaccagctctggatcttccctctctaagacaagttaagtccagagtaggggagaacaggaaggagtggggtctgggaactatgtaaactatatcgtgatagattgtgttcaaaatgaggaagggaggatggatggggaaagggaaggcggacaacggacacagtttcagtgagataacaggaatacattctggtgttctattgcacggtgactactgctaataatgtactgcatatttcaaaatatcaaagacagagttttagttttagtttttgttttttaagagacagggtcttgctctgttacccaagctggagtgcagtgcgtgattatagctcactgcagccttgaactcctgggctcaggccatcctcccgcttcagactcccaagtagctgggattacactgcgccactgtgtctggcaagaagagtactttaaatgttttcaccacgaagaaatgataaatatttgaggtgataagtatgctaattagcctgatttgatcattccacaatgtatacctgtatcaaaacatcatattttactccataaatatatacaatgattatttgctacttaaaaataaaataaaactcagctggatgcagtgactcacgcttataatccctgcactttgggaggctgaggtgggaggatcacttgaggccagaagttcaagaccagttgggcaacatagtgaaaccccatctccacaatttttttttttttttttacttatccagatatgatggtacatgcctgtagtctcagctacttgggaggctgaggtgggaggattgcttcagccaggaggttgaggttgcagtgagttatgatggcgccactgcacctcactgcagtgagttatgatggtgatagagcaagacctcgtctctaaaaaaatgaataactacataaataaaataaaacttaaaattaaaatgaggtcaggctttctgacactctgagtaatctcagtctgtctggtggtgggacgcactgcctgggaagggagtgggtgcctgccatggaagccacctgggtgaaaatccccacctggcaacaacaccaacaaggaaacgcctaacctaggggaaggttagactagtggggtgcaagggtcccttccagcttggaaactcgggggtttgagccttagccctctcacctgcttcttgctgtgtgcctgggggaagccactttccctctgggccccagcctccttaactgtacaggatcacgatgcaagttgttatggagagacctgggccttggagcccagaatcctgactgcccctcacacacctcaggccgttccttaccctctttaagcctcagtttcctcaggtgacaccacaataagtcttacttcatggagctgttaaaggaattaaatgagacaatatgtgtagaatgtttagcctgattcctcttcacttaattggtccttcataaatggcagtcattatgactgagtcatttctctcccagggcctcagttttcttatctgtaaaatggggataataatgtctactttttcactgggttgttctgaggcctgagtaatattatctagaaagcattttggaaattacaacatatccctcaaaatgagcatttgctaccattgcccacctcatgtcaccacacttgaatgtgagctcttgagggtgggaacccaatctggctgagtccttccttccttccatctgtccatctatccttctttccttttctttctttctctctttctttggagacagggtcttactctatcttctgggctggagtgtcatggtgcaatcatagctcactgccatcttgacctcccatgctcaagcgatcctcctgcctcagcctctcaagtagcttgggggctatgggcatgcatcaccacacctggttaattttttttttttaagatacagggtctctctatgttgcccaggctagtctcgaactcgcctcaagccgtcctcctgctttggcctcctaaagtgttgggattataggcataagccactgtgcctggccaaattcattctcttcctgacaactaacaacttccagctcctgcccagatactctgctgagcttcagcctcaaatatgcatctgcttagttgatgttcccatgtggatgattaatagactcatcaaaccctaacatgtccaaaatgaaactgctggctctctaccccagccttccaaaacatcccattcctcccatcttccccaactcaggaaaccacgtcattaccacccagctgctgaagccaaaatcctaggagtcatccttgacctatccaatcaatacaaaatagcaaccaggatccccatcctcaccctcctggctcaagccaccctcatgtcccatctgtatgccttcaaggacttcctactgggctctcttttctactcttatcccctgcagtccattctcctatcccctgcagtcgattagtacagtcactccactagggcaagctctaaagatgggagtaggggcagaggagtggccgttctccagtgtgggttcttctctggacccccagtggttggccctgtgacatggaacccaggaagttgtggcgatcagggcagaataccacaaatggagaatgattcaacagggagaaaaaaatacctacatatggactgcatattacatcacatgctaccttatgctaaaattccaggacagacaggcaacagcagatcccaacccaggaaccagtgggagcaactggcatgcctgggccaggctcctggactccaaggccctgtggatgaactgaccacacacctccaggtgggcagttttgattggcctggtacccactgccccttcttcaacttattcaagcaacagaacccatctctttcaggggttacactttcccatcctcaagtcacgaggtccaggtagggctgaccttgccttctctggggtcgagggcaagggctcaaatctagccaggggacgtgtttttgtttgtttattttattgagacagagtctcactctgttgcccaggctggagtgcagtggcacgatcttggctcactgcagcctccacctcctgggttcaagcaattctcttgcctcagccacccgagtagctaggattacaggcgcatgccaccacggccggctaatttttgtacttttagtagagacggggttttaccatgttggccagactggtcttgaactcctgacctcaagcgatccgcccacctcggcctcccagagtgctggaattacaggcctgagccaccctgcccggcccaggggacgtattttatctccctgggcaggatagctacaagtctggaaatgctgacacccattttacctgccctacaatgaaacagggagacagacccctggagctgggcctgatattccagaccaggccttttcagtgatctgagccaaatattcctgagtcttcttcagccacctggacttgggctttggctcctccctcccagctcatccatccctatttgtgcggctacagcctgccctgttttctcactttgcacttgccattcccacagcctggaagccccttcccagcaaactccttcccattcccctgagttcagatcccacctcctcctgaaagcctggacagatgtgggtcctgattccctcagacacacatcacatttctcttcccacattcccatcacactcagttggtttctttgggaaactttcactcgctaggtcgtagcagcctaaaagattttgtcaagctttatttgccatggtcctattaggaaaataggaaattttcccccctactctccaatataaaatgatgttttaactgttaacgtaagttttcaatcaatgcctgcccctaccccagacattctgaaatacttccctggagagatatctctcctatccttgattgaaaatctgccgcaaaacatccctcattgattcggtaaatatccacacagccccctcggcagaaggcagcacactgagcaatggacagacaaattatagaactgtattataattgccccttcgtctgtacaagctaggagattgcagggaaggatcctgccaaactgtttaaccagcatttactttggaagctgacatcagagggctggaaggggggcttttccttggtactttatataatttcaaagggatagcatttatgagtgttttttactctctttcctgggcttcttagtatctttcaagtgaaacatttcttagtggctcactgatgtgcttgctccactgcaggacggggagcccctcaggggcaaggatggctgtgactcactcctaagtcttcagcttcctgccatggcctgacacacaggaggccaggaaatgtttgtggaatgactgcaggatcagagcttagcaggcatgagaagtggactggggggtggaggtcatgagatgcggcccgggagagacatccgagcctaggagccggggaaggctggagcagtgggtaggtaagtcaggaagagctggtccctctgcagcctgggcccagcacagtgcccataggaggtgctgttgtagaaatgacgtcaaagggcaactcagtttgtgagagagaattcccagaaaacaaacttggcccagctttgcacttgttgaagacagaaagggaaagatcagagctgagggaagctggggaaggaggagtgagaggaaaggaggaggggtttaaggagcccttgacaatcagggcctgggctatacggcaggtggtggaggctcagcttgctgctgctgggtccctggggagctgggggaggtggctctaggagtgcataggcaagaatgtctgctgctcacagagatggtggcctggctgggtctgcgctaggctgccctgttctgccttctatcctctagtctttgttccttcaactgatatttcctcgagcagattcaggcacggctggggggagggaagtcatcatgacttcctagaggtgtggactcctgggctggggctcagatgaagaggaactgtccaggtaaaggaagggagcagacttcccgggaaaagagagaacaagagcagggccactgagatgcaaaagagctcagccccagtgaagagccccaagcccttggcgttgctcagtaaagggctgtctatgctacaaggcaaatggaacacctgctgctggagtctctggtggccggggtgggaggggctagaaaccatgttccgtgaaggacagctaaaagcagcagccgcggatcatgtggttagagccctggacttccaggccggctctaacactcatgcttacagaataatctggggcaggtcactttaccccttggagcctcagctgtggggaggattcatgggagcaaagaggccatcactggcatggtgcctggaagaaaggtggcacccaacagactagttactgttacttcaagagccaggtattgaaaggctacatctgggctgagcaccgtggctcatgcctataatcccgcactttgagaagccaaggtgggcagatcgcttgagctcaggagttcaagaccagcctgggcaacatggcaaaaacctgtctctacaaaaaatatgtatatataaaaaaattagctgggtgtggtggcatgcacttgtagtcccaactactcaggaggctgaggtgggaggattacttgagcccaaagaggtcgaggctgcagtgagccataatccgccactgcactccagcctgggcagcaaagcaagacctcatctcaaaaaaaaaaggctacatctacaagagccatcacggagccatgcgcccagtttacagagtgtctccacagaaccaggcccagtggaaggaagttctaaggaggcaggttatcagctcagtgttaaggaaagtcccaaatgggagcattggccaataatggaacgggccattattggggtgaactgtaacaagggaacagccttaccagggctggacagctccctgcatggacagcatctatatctagggttctgtggaagtggttggacggagtgagagaaaagccttttgtggagcagtcactgagggaaacgccaggctaagggaagttaaacaggtggctttgctgtagggcttcccacgaccttcactgccctgaaacttggccacagctctaaggcttatgaaaaccagacagacaacatgaatgggtgaaaaccagacagacaacatgaatgggtgacatgggaaggggtggacaggagtgggctggagacagctgcccttcggaagaggaagcctactcagctcccactctgctcccccggctgtccttatgggaactctgttggccactgttaggggttaaattgtgtccccaaaaagatatgtggaagccctcactcctggtacctgtaaatgtgaccttatttggaaatagggttgcagatgtaatcaagttaaaatgaggtcaatggggtgggccctaaactaatgactagtgtccctacaagaaagaaaaatttgaatacagagacaggtgcacagagagaagatggccatgtgacgacagaggaggcagagattggagtgagccatctactaagctatggaacaccaaggattgacagcaccatcggaagccagaagaggcaatgacagattctccctgggaggcttcagagagagcacggccctgccgataccttgagtttggacttgtggttggagacaatatgtttctgttgccttaagccacccagtttatggtattatgttacggcagccctaggaaactgagacagccactaattcatgattaactatggaccagcaaaagctccagagtcagggaggtgatggagaacctcctaattcatagatcacgggccccttttttgaaagagcatcttgttggataagccaggggacacgatgagggtagggcactcattcttattcttaaccttttgttttgtacccacatggtaccattcacgagagtgactcctggtttccttacctgtatgttgaggacaacaatctcaacctcccaggaggctgtgaactcccagcgagatgcacaggaagcactgcccccaacacaccaccagagggaggattatgatgtgggatattcctccctgtgagcctcactttacccctctgtaagatgggacagcaacatcttccaaagcttcctagggttgctaggaactgcctggcatgtggctggtggtcagaacagtccatgtggaccagtcagccccttcccacacactcactgtttctgcatgtccttcactgcagggagcctggtccccagtggctgcccttacctgtgctgtgagctggatgggttgggacaaggtgagctgtggggtcccagggggctggctggcaggctgtggtggtggcaggtcaccccccccagaggaggctgggggctgtgaggtcgaggaggaggcagaggaggaggaggaggaggaagtagaggaggaggcggaggcggcggcggcggcggcagcggcgttagcggcagcggcggcactggactgctgcacggcggcggccaggagctgggcctgggcttgctgcaggaggagctgctgctgagctggcatcagtgccgtgagctgcggggtgtcggggacagcaggaattggagcaaggggttgaagaggagcagagaaggcagagaggggttagtgcctaagccaagcaagtaaggggacaagacctcctagaggacagaagagggcaagaggcaggtgtgagagagtggccatggccttggtggaacagttcatccactagccctgtaacagatgaggggtggctggtttgtcccctcgtccccatccttccccaagtacttaccccagctagctggctgcccgtcaacatgagttgggcctggggcagatgaggctgggccggctgagggggcaggggtgctgctggggctgaatcgccactggggtcttcagccttgatctgggggggagagaggcagggtccgggaccccagaatgttaagtggaggccagagagaatgcccacctgtgaaccaaagagagggcacgtgtgtggcaatggcaatcaggctggcacaggaggagcagactggggtgtggacatgagggtgcagtctgtggtcctgcactgaccgctgggagcttcaaaccactcctctggcctcagtttcctcatcaatcagatagggctaacacaacacctgcacccaaactccctacagaagtcgcctttgcagagcacttttcccctcctgagagtcagttttcctgtctgtaaaatggaaaagagtggctgggcacggtggctcatacctgtaaccctagcactttgggaggtcgaggcaggcggatcacttggggtcaggagtttgaaaccagcctggccaacatggtgaaaccccatttctgaaaaaaaaaaaggaaaatactcccactgggcacctgggaggtcaaataagtggcttctgggtcccacacccttcatctgtatcacacagaggtacatctctcttgctttttttttctttttgtttttgagacaaggtctcactctgttgcccaagctgaagtgcagtggcatgatcacagcttactgcagcttctacctcccaggctcaagcaatcctcccacctcagctttccaagcagctgagactacaggtgcccaccacacacctggctaatttttaaatttttctgtagagacagggtatcactatgttgcccaggctggtcttgaactcctaggctcaagcgatcctcctgccttggcctcccaaaatgctggaattagaggcataagccactgcacctagccaggtacatcccttatttgtccaatgaagtaagactttgttggaagaaaaggttttcaggtactaagaaaaaccaccaccttggaacctgggctacaaagtcagatgcttacagaaatgggcacaaatgaatgacaggagtaggggtggatggaggtgggctggagagagcgcctgcctaagtggaaatcttatctggctcctactcagctcctgctggccactcttttcaaaatctagaacaaaaatactggcataataagcaaagcacagcatttgtcctgcactgtggacaagccagatgtggcccaggaaataccaggcttcagcctccgctcctgaggtctgccaagcctctccatgtctttctgaatatgatatggacacaccttgcaccatacacacagaacagaccagcatagagccaccctggcctcctccattcctaggtaaaaagccagacaacagcagttgttggctgaaaggcctgttggctgaagcacacacagtggtgggagaaggcatggcctgatggatcacacaccctcaggcctaaagtggacagtgagtttatccttcagcctgatagcccaacaccattttgtaaaaggaagtccagagacagaaagcaacttgggcaaaatgacacagtgtgttggcaggggggtgatatttggaatgtggacagagacaaacagaggccaaggaaaggccaaataatagacagtgaatggcatgtcccaaattatggaatataagtattagaaagtttaagagctacagaggccaagtgtggtggttcatgcctgtaatcgcagcattttgggaggctgaggcaggaggattgcttgaggccaggagtttgagactagcctgggcaacagagcaagacaccgtctcttaaaaaaaaaagagagagagagaggttaaaaaaaaaaaagtgctgcagagatgcagcatgaaatgacactgagtatgagaagtcagggtagcagctatccctggcaggggcattaagggcctctggaaggctggtcgtgctctgcttcttgatctggtgctagtgacatgggtgtgctaagtttctgaaagttcacagagtcatacattgaagatctatgtgtgtttttaatgtgtatcatattttaatacaaagtttttttaaaaataggctgagcgcggtggctcgccccttaatcccagcactttgggagccaaggtgggaggatcacttgaggtctggagttcgagaccagcctggccaacatggtgaaaccccatctctactaaaaatacaaaaattagccaggcatggtggcacacacctgtaatcccagctaattgggaggctaaggcaagagaatcacctgaagccgggaggtggaggtgcagtgagccaagatggtgccatcgcactccagcctgggcgacagagcgagactccgcctcaaaaatcgcttgaacccaggaggtggaggttgcaatgagccgagatcatgccattgcactccagcccgggtgacagtgcgagactccgtctcaaaaaaaaaaagttttaaaaaaataatgttgaatgccatggtgagcacactattcccttttcagtgcttttttcattgtttctggttatcttaaagtctctgattggtgcttgaatgtctttaccatctctccaatactagctaatctccacttttattttaattttttttttgagacagggtcttgctctgtcacccaagctggagtgcagtggcaccatcaggactcactgcagcctcaacttcccagactcaagcgatcctcctgcctctgtctcaagtagctgagactacaggcatgcacacccagctaatttttgtattttctgtagagacagggtctcactatgttgcccaggctggtcttgaactcccgggctcaagcgatctacccaccttggcctcccaaagtgttagaactacaggcttgagccactgcatctggcctaatctccttttttttttttttttgagctggagtctttctctgttgcccaggctggagtgcagtggtgcaatctcggctcactgcaacctctacctcctgggcacaagcaattctccacaatgcctcagcctcccaagtagctgggattacaggcactcaccaccatgcccggctaatttttgtatttttagtagagtcgaagtttcaccgtgttggccaggctggtctcaagctcctgacctcaggtgatctgcccgctttgtctcccaaactgttgggaatacaggcatgagccaccgcgcccagccctaatctccttttttaataagcctctttttaataagcctcttttttaacaggcctctgaggtttagacccttcggcacacaagagactctgggtaaattttaataatcatcatatttatttccatggcaagtgattctggttttccatttgtgaaatttccatttaaaaaacatttatttaaaaagctgtcgaaaagcaagccagttcatgagttggtaattgttgaagctgattgatgggtatctaggggctttattttcattataaccttctctctatttctgtatccacttcacattttccataataaggtgcttttttaaaaaattgagccaattaacaaaattattatgtaaatagttgcgcacagtggtcttatgcctgagactgtgacagaagcacatgaatcacttcagttagggaaagactgacacagaagagatggagagaagttgagaggcaaagcccagagaaacagggcgtacagggcgagttgtggacagagcccgaggccaggaaggggagggagaaaccttcattcccttggtcccactggcatccccaaaagaaggaagcctgctgccagtttgagaacagactgcaaagatctgattcaactgaggacagggtgggggcaatggatacacgctgtgctctgagggctaaggcaatagccaaacctgccatcagagggtcaaggaggtcaagatcgagagcctgtctcccctagaccccgttcaaagcgctcagcacagaagcaggacatctgctcacaaagcacttttatcctctcctctcatggtagcatgggggtacaccagacatggaggcaaccacagaggccatcccatccgactgccccctcccccctgaccaatgatactgaagaggaaactgagaggcccagagaggggaagtgactttcccatggtcacagagcaaagctgtagcagggtggggagcagttcccagcctcccaccccatccctcagccaccactggtcagggtctggagtcctgctcacaccttctctgcccccacctccagtgctaccttcaagcctctggacctgcctgctacccctggaccaggctggagggtggagactggagcccaggcaaccccaagaagcccagaatgccaggcacagggccccatctggatgtggaatttgcactgcctggctgcttccggcctccctgtcattctctcctgcattcctacagctatcctcaactggtaccagcccccccacccccacctcagctggccgctaaatgtgtatattgggggacaggcggtggtgcaggcctctgttgggtcagggaagttgggatgggggcgggcctttggcttcctgttgttcatcgccctggggctctgggggggatttccctagccacccccaccccctagggaaggggaaggagcctgcgtgagtcacaggcctggggtgggagcccaagagtgagaaggggcgggaggaacctcgttaccaaggtaccaaggctcagtgctctctcagcccttggactgaggcaggcctcctgaggaccctcttccaagcgctgcccacttccctggctgttctgacaggtgcttacctttgtactggggccagttggggacacggagaatggggaggtcttattttgggggttctgcaaagagaaagtaggagcaaggggatgggaatagtgcagtgaagcagcttctgaccacccccgctccctgccctcctaccataggcggcacagagccccctctgaacccctctccccattccttcccaccccctcccgcttatccactccctcctaacctgatgattagtgtctggtccatttctttcggtgtctgcaaagagagggaaaggatgtgttgtcatcagccacccccaccacacctgtcccctcccagctctcttcccatctgtcccacttcccctgcccacggtgacccctgcccccctgctccctgcccacccacctgtgtgctctgatggggagtccagaccttgcttctcggcctccaggggcttagacattcttatttctggggacagaggaggaatggaagtggggtgaaggaggggaatccaggagggctctcgggcccccattccaccacactccccaagcctttcccccaaattccccccttacccccagccaccttggaagtgtctcttcccaagagacatgtcctccgttctgggcctctgccctcctctggcaagatgagacacagcacttaggccttgggggatcttgccttatcctttcacctctccagaaagtaacacaggggtgttacccacagtgcagcaaagggcagggcaggagatggaaggtggtcgtgagaaggtatcagctgcccaggaggaggctggtgacgtcccaaaggagggagagcagccttgggcctcctcctggggcgggccgcccaggctcccgtcctgccctaccaggtttcgggtgagacatgttttccactctgagtggggcctcagagatgtgatggggctgcagcgtccccaaaggaggcagttgtcagatctcagcatgtgtgattcagccgccctctggccctcttcccaccccaccactttccccatccacatcttactcccacctggactttcttcctatgtttagcacaccggcctagcagacccaacctcatcctctgtaacctcagctccatctggctctacccctgagcttgtcctccaatctaaacctgatctgggacttcacgcttgagccccagctgcagtctcaagtccacccctgtaatacaaccccattctatagctccctaggcccaggaaatgaaaggaggtggccaagggagggtggcaggcagcaagcacataaacccacggagacaaatgcctgtcctcaaagcgctctgatacttttcacagaaaggcgagtgctcaccagtgccaagcatagagctagatatgactcacagctcacattagcggttagtgctaatattaccccgttttacagaggaggaaactgaggctccacgaagggatgtcacctccccaaaagcacagcaagacagcagatgtgccctgattggacccctggtcttcatgactgctgggctcctacttctaatcggatccactctagtctaatgtcccctagtcctgacttccagccatctcatctccaacagttccctcgcccaagctcatcctgaaactgaatccaacccttcctggtcctagaccccaggacaaatctgggcttcagcctgacccatccttagtccacttactcaccttgaatcccaagttgtgcccagatggctcaagtccttcatctgaccttgactcccaactgtcctgagatcctgtccctgatccaaactcttcccacaactcactccaaaatccctgcctaaaccatgaccccactcctactaaaggagctgtccaactctagtgttctctgcaccaagatacttaaagaagacagctaagccaggcacagtggttcacgcctgcaatcccagcactttgggagactgaggcagccagatctcttgaacccaggagttcaagaccagcctaggcaacatggagaaaccccatctctactaaagacacaaaaattagctgggcatgatggcacgcacctgtagtcccagctattggggaggctgaggcaggagaatcgcttgaatccaggaggtcaaggctacagtgagctgtgactgcaccactgcgctccagcctgggtgacagagtgagaccctgtctcaaaaaaaaaaaaaaagaaaaaaaaaaagaatggagctaaagtaagggataagaaataggaagaactcagtaactgtaaaaaaaaaaaaaagtctagaaatcttgcaattgagtattattcaatgtgaaatgctgcttgagttttaaattcctaattaaaaaaacaggtcatgcattgctggtgggagtgtaaattgatacaagcaccactcagaaaagctgaaaagatgccctctccctaagatgcagcacgtccactcctgggcatctgcccaaaagaaacacgtgtcctgcccatcaaaggacatgggcagaattcttctgcagtctttcataatggccccaaactggaaacagcctaaggggccgtcaacaggtgaatggataaataaaatgtggtatgtccatacaatgaaatatgccacagtaatgaaaaagaacaaactcctgcttcatacacatggccgaagcttggagacatgaggctgaatgaaagatgccaaacacaaaggcagacataatttatgattccaattacaggaaattcaaaaacgggcaagctgatagcagatgatcacagtcagatgagtgagcaccttgggggtactgactgggaaagggcatgaggaagcctgcaccaggtaagaaaggatcttgtttggtggttacagggtccttacataagcaaaaattcatcaagctatacacttaaaatttgagcactttactctatatacgttatgttttaacaagcaagaaaacatttaaaagctaaaaagcaaaacgccagcacacagtcccattaagatgcacactgcaccaaggcaggtagatcacttgaggctaggagtttgagaccagcctgggcaacatagtgaaatccccgtctctccaaaaaataaaaaagttaaccggacatgatggtggtgggcacctacagtcccagctactcagtaggctgagatgggaaggtcgctcgagcccaggagattgaggctacagtgagccgtgattgtaccactgcactccagcttggataatagagcaagactctgtctcaaaaaaaaaaaaaaagatgtagactgttgagggtgggggtggggagtgggtgcccaggacgctaccagagttcaggtcctgtttcctggccctggggacagggcattaaatggctactgatacaagatataagaaggacaagaagggagctgggcagcaagtgtgtcctgactttggagcagtaaaggcgggaatcctgcctgatcctagctctagttcacccagaccttagccctacttcaggcagccactaactctaacccggtcctaaatcccacccctcctagcatccctaaaactgcagccccagcctcctctggcctccgtccctccagcggagctccacattgcctcagggcaatcctttcctggctcctccctatctcctggagaaataaacaacctggcctccaggggctggcccaccaccctgtactgctcttctcttgcagctcatgcacagtgctcttcacccatgtcgagcatctccccctgcttgggggtctgcttgacagcaggctgtgcaggttctacactcccacctagctgggcatccctctcccgtccacagaacagggcagcctcggaccccactgccagcccagaaagtccacactcatccttaacctctgctatgggctaagttgcatctaccaaaattcatacacggaagtcctaattcctgatacctcaaaatgtaattgtatttggagatagggtctttaaagacgtaattaaggtaaaataaggtcattagggtggaccttactacaatctgactggcatccttataagaagagggggcgggcgcggtggctcatgcctgtaatcccagcactttgggaggccgaggtgggcagatcaccagttcaggagtttgaggccagcctaaccaacaatgtgaaatcctacccctactaaaaatacaaaaattagccgggcatggtagtgtgtgcctgtaatcccagctactcaggaggctgaggtaggagaatcacctgaacccaggaggcagaggttgcaggcagccgagatcgtgccactgcactacagcctgagtgacagagcaagactccatctcaaaaaaaaaaaaaaagaagaaaaagagggaattaggtcacagatgggaacagagggaagaccatatgaagacccaggagaagaccagtggaccacaagccaaggagagaggccttggaagagaccaaccctgctgacatcctcgtctttaacttacagcctccgtaattgtgaaaatgaatttctcttatttcagccacctagtctgtggtactttgatgtggaagccctagcaaactaagcctctcacagcccctgccctcctgctgtcccatccctgagcccccagttgtggctgtctgtgtccaggttccttccccacaagaccaatgcgacaggcctggtctgactcatcactgggtccccagcatcacaagcccagaacgggttgtaactgctgaatgtccctctctttagcagtctctgtttcctactacttctcacccttgtcttactgtctccctgctatttattttatttaatttatattttgagacaagagtcttgctctgtcggccaggctggaatgcagtggcacaatcacggctcactgcagcctcgacctcctggggtcaagctatcctcccatcccagcctcctgagtagctgggactacaggtgtgcaccaccacatccagggactacagctgtgcaccaccacatccagctaattaaaaaaaaaattttttttttttgtagagacgggtctccttatgttgtccaggctggtctcagactcgtgggctcaaatgatcctcatgccttggcctcccaaagttctgggattacagccatgagccaccatgcctgcactttgccatttaaaacatttcctgaggccttggcatgggctgttccctctgtctggaacactgttccccaatctgtccacctggcgacccccggactcatccttcagaacccagcataagctctgttttcttttctttttttttgagatggagtcttgctgtgttgtccaggctggagtgcagtggtgggatctcggctcactgcaagctccagaggtctcctgggttgaagcaattccctgcctcaggctcccaaatagctgggattacatgtgcgcgccactacgactggctaatttttgtatatttagtagagaaggggtttcactgtgttagccaggatggtctcaatctcctgacctcatgatctgcccacctcagcctcccaaaatgctgggattacaggcgtgagccaccacgcccggccataagctctgttttctatgaaaccaccaccttgatgcccccagctcccagccaggtctctctccagctccccataccctagcaccttcccttgtcactgtcttagaggctgactgtagctagccgggccccactatgtctcccctatcagactaggaatttttcaagggcagatctgatctcaggttcctaaacactccccagcagaagacatgtggatcagtggccccaaggtcctgatctccctcccccaggcctttgcctctgctcgtctcccacttgggtgaccctttccttctctactggcaaactcttgctcctctttaaggtccagctcaaatgtcacctcctctgtgaagtactctctgattccccagatggtcagtgtctctctcttctgggcttcactgaccctgtactgtgctccaccacatcctgatcatcctgggcagagacctccaccccaactgtgggctcctcaggagcccaggctggagtcattgctgcacaggcctaggagtacgtctttggaatgaatgaatgcattaaagaatcccctaactgaccagggcccaatcctgtctaaaacaaacccctatctctactgtcacccaacatccccaagaaaccctaacttaaatctttaaggtatgatttcctctgcagagactgtggctggaaagacaagagtggtttgagggaaatttttcaccattctgttacccttattctccctaaattatcccaaccactcctacatatccctgcatactccctgccccacacttggctgggtcacaacaaaatggccaactgctgccctttgtcttttctctttccacctcccctgtcagagctcaatctgagagaagggtcagatcatttccaccaggaatgaacagggagctccatttccaccgtggactaaaagccaaatgacgccttaacagggactccagggcactagcaatcatagacttggagggtccatcaaatggctcggcctcagcctcagcctgagcccaggcagagatgcccatcgcctatcactcaactctagaaaaatattgatgcctgttcccaccctagactctgatttcagtggtacagggtgtgacttgggcatccagatatttaaaagcccctccaggtgattctctttttttttttttagacagagtctcactctgtcgcccaggctggagtgcaatggtatgatctcagctcactgcaacctttgcctcctgggttcaagcgattctcctgcctcagcctcccgagtagctgcaattacaggcatgcatcaccatgcccggctaatttttgtatttttattagagacggggtttcaccatgttgggcaggctggtctcgaactcctgacctcaagtgatccgcccacctcagcattccaaagtgctgggattacaggcatgagccaccgcacccagccccctcctggtgattctaatgtgctccatcccctggcaccttcagaagcccctctcaaagcctcattcacacacaaaagattggttggttatgtatggctattcccacccctcatcataggtaatgtgtaatattttaggggaactgaaagagaaaaagcaatgcatagccctaccaggccccttggagccatgttgccccttgaatcccaccttcctcaggtcagacacccctcaaccagggctgcccagccctgagctcacactcacttgcccgactgccccaggcctgggactcttggtcctctccaccctcccactcctccctccccggactttcacttctcctctgcatttccccccgccagttttagcagacttaggccagcttctcgttagcacttaccgaaaacggggctaaatatagagggcccaaggactgcccctcacccctcctggccccacttgtcctgtcccctgggtcccctgcctccgcagcctgcttcaattaggggtatggcctgggagcccctgtgggcaggttggtgctgccgggaacctctgtgggcccagctggccgagcccccgtcctccccagaagcagcacctcacccctccccaccccacagctgtccctgggtggcctcaagggagtgaacatttctgagttgtcaggagggagggatggagatacaggcagcagacacaacaagagaggtggccccacagctgcgctgacagcaggcaagagctgccaacagtacacaccccatggccacagccaggcaaggccccggccaacacaatacaagaaacagatgtgcacagattccagacaggaatgtgaacaggtttgcagatacgacacatgcccagacatgatgccacgggcatatatgcaaaacacacacccaaacgtgcgtacacacatgcactcacacacactctcacactgagtgacacacagccagccagacacacgtaaaaagtatacaaactcacacacccggagtcgaacacagacatacaccctccccctacatactacacccagtcactcacagactcagacatgtgtacgcacacatgtacttacacatgttctcacaccaagtcacatcagtccagccagagatacacacccagacatgcacatgctcacacagagtcacacacacaaacacaagtgcacacacatacacccagagtcaccttatcctggaagatggccagggctgacctctgaacccagttcacaggtgtggagtctgagaccaggcagggtgagtgatctgcccacagccacacagtgtattaattcatgtccaggcagggaaaattcaccccagtcttcccacactgggctgttctgtgagaaatcccaagtaaagggtttagcctactgcccagcacctctgaggtccccatttaaccccagagaggaacgagtcagtgggagcagacaccctggatctctgtgtctacactgtatggacacacacacatatacacagttgcatacacagtcacctcaacaaataaacatgtcaccctgcaaatagtcttcctttcatcccacccctctcctcaccgcctttgcttgctcatacccactcattcttcatatccctgctcagacacccccttcctccaggaagccctccttgacactctaccaactaaatcacatgttttcagggctcctacgatcccctaatacctccccgtcctggcccaacccctctacctatgtccccctatcccagccctgacccctctgcctgggcctcccccatcccagccccaacccctctacctatgtccccccatcccagccctgacccctctgcctgagcctccccaaccccagccctgacccctctgcttggggcctccctcatcccagccccaacccctctacctttgtccccccatcccaccccgacacctctgcctgtgcccaccaccccagccctgacccttctgcctgggcctcccccatcccagccctgacccctctgcctgggcctcccccatcccagccctgatccctctgcctggacctcccccatcccagccctgacctgtctgtactgtcattggtgacaggtctgtcttctccaataaactgggagctccaggaggacagacctgagctaccctttccactgtacttccaacacccaacacagaactactcaatagatacatgttggtggaggacacacgggtgcccgcacacaatggcgcatataggacagcacacaccaccaaaccaagactcatgcccatggtcatgcctacacagccacaaatgaaacaggcatgaagggctgagtgcttgccatgttccaggcactgtgctaagcatgctacatgtattacctcatttaagactcccatcaacactgctgagtgatagccatcaccatacagacatatacacattctactaaatgagccaacagctataaatcaccttgtacagtgcctggtgcacaatgttcactcagccaactgacatttggtggagaaggcatttaataagcacacaaacaaacacataatgaaattcccagcagtgatacgtgccgtgaagaaaagataaagcagggtgaggggactgagagtgacaggatcagtgccagtttagatggggaggtcagggaaggctgccctgaggaggtgacatctgaggtgaatgaagtgaagaagggagccaggcaatcatcaccccacaatgccacacacaacagccccctacactcacaagcacacagcagtcccactcagagcactcagaactactgcacacacacatgcacacgcacacctgtaccagatgtgcacacacacactcaaaagggaatgacatcccccaagtccagcaacttggcattccaatccctttgcagcccttatccaaggattgcccatgtcacccaccccactggttctccacatgagggcccgctaccaacacccagctccctccctcccgtccccagacccttcggaacagggcaacagagaagagaagatgttggaagttccggtgcctgatgtggaaagagagggcaaagaggagctgtgggggttagcggggacccggcatgggagagagggagttgctagagtacagaggagaaggacaatggagacagctgaggaggaggggcaggcagggcccgcagagcaaacctaaatgtgctgcctgtcctctgagcagtggcacaggcaccagcccccttacctggagcccccatgctggagtgaaccatgctgcccgccccgccagggctgggggaacaactgtgtcatctccccaccctctctgggggccgagccctccctgccggaagtcactcagggaggaaaccacagggccggtccgcccccttcagaagggaaaataccctggcccacagacccgccccggcagcccggcccaccccaaatcatgtgtgtgtgctggggggtgggggctagtggggcagaggataagcaggctggaagagccgactcctacggctgcgatccaagaggtgcctgcaacagttgccccccgacttctgtcgcccccatggaggcaaacaagtctggaacagggaatgggggtctgggagagaaggtgggtccacagcagtaacaacaataaaacactagccagcagcttattggagagagggctttgccgatgcctgaccctgtgcctcactcttgacaggtgccatctccaatgtggtggtcactcttatttgccccattttacagatgaaaagactgaggatcagagaggtgagcagtagctttcccaaaggcccagagccaagaagcgttgaagcttaaaagcacgccgcggcagggaagatcaagcaagccctgcgcctatctgcaggtgagctgttgggtgccaccattgggaggaagtggtgcccgtgggcagtggtagtggggacggtgggtcggggacttggcctggggctacaataagtcgccggccaaatgcgggcgcccgaggcggctccagtggaggggagcaccaggtccccgggctgccggctggctcttcgcgctgcggcgctcccatttcagcgcttccctccgtgcccgccagagggcggcagcgcccagccaatgggccggagggcggggccggctgcggagaagggagcccctccctccgctcccctccccaacaccctcccaacacctccgctcgcacacctgcgagggtcacacaaaggcgcaggactcccggcgcaccgcagctcagacaaaggcgcgcccgagtccgctgccctcttcctcttggtgcccgaggtctgaggctgtggggctgcctggcgtctccagacaccccacatgcccgcctgggccccgcaggacatcctgcgccccgtggctggggggccccctaaaccacaggtgcatgcacagacgcctggactcaccctcacacacacaagtatttctacagatgaaccccagcacttcacacacacacacgtgtgcacacacacgtgcatgaacacatctatgtgcacaggccccaacaccagccctccctgctgacgatggtcactcccatatactgatacctcctctactccctcacatggacccatgggcacaagggcacttctacacatatgtgcccaagcatacttcctggccactcgcacccactcacacacaggcacactcagaaagggtatactacaggcacaactacaggagtgccctcccctgactgcacacgtgccctgtgcacccagacacacccaggcaagcaggtgggcacaacaggaaggactggcagttctcatatatgcacacgagaggtgaccgtttcccggcatctacactccacaacatcccgtatcgtaaaggccatttcacagaggagatccacagaccacacagcaactggccacaggatttctatacatgagggtcttcccgacagcagcctggtagcagtggacactggagccttgtctcaaagcgacatttacgcagtaagctttgttttcagttaggatttgttttggggggcttggaaatggggctataggacattatgggggggggcaaaacctcaccagccacccttatgctccaccctggacagactcaacatcatccacgtcaggaacacgcttttggatgtgaccccattccagccccctagagccagcagagaaggaccacccacttccagtgcggccaggtctgcagttcagtcctggagccggggaaggctgtatacgctccctgagagatgaaacaaccccacacctctcgcctcccatgctggctccattctcagtgcctcagaccagagctgggcctggtgaggggatcttgaaggaggatgggcctgcctgagagaggatagaggggcagagtttggaacacactggcagctggaacagggaggctcaaggcagggggagatggtggcctcgttgccacagaagaggcctcgagccatgctgagggaggcaggtagggcatgggagctagggagcagtgggggccacttgaggtgcagggagctgggagggaggcggtacaggggaggccaggctgggctcagggctgagcggtaattaaaggagacgtagggggctccccagggccagcggggctggtaactgacacgcgggccccattgctccgctcatatttctcgccggatcgatacgtttgactcccgacaagacaataatcgcttgtacgcggccggcgagtcgatcaaatacattattagagcgaggtcccccgggggcccggcggggagtggtgggggggagcagccagcccaccggggacagcagagcgagattcttcacccctcagggccccccagccatggcctcttcctcttggccacccctggggaccctctctgtggctcagttccccagcctctctctgaatgtctgctgctttggtgatctctctactcagcccccagcatcatccttgctctgtgagggaacccaagggttctttccccataggcactgccctcatctgtagggctgtggcatgtgggagctcagagaggctcctcagacccctagcttggcaggagacagggagaccaagcctcaggccatactctgagtccatggctgggccaggagatgaacttgggcccaagactcaatgatacccacctccctctgcccagtccccttgctgcatctaagcacacggggcttcagcagcgcccaggccaggggcagcctctggggggttagggaaagctaacctagggacccaaacaagcaggaaaacaggatgataggggtggcaggaaaacaggatgataggggtggcagacaaacacatacacaaagagatgtgtgtctgctcctgctgcagggccatgtggtcccccagtgggcctcagagaccctcaaaccatgcccagcctcagctctggcccacccgagacactgcttgccactcttgcccactttcctggcttctaggctcaagcctatttccccttttaaaaaaaattaaattaagctttagctttatttttaaagtccaggctctttttttttttttttcctttgagacagagtctcactctgtcgctcaggctggagtgcaatggcacaatcccggctcactgcaacctccgcctcctgggttcaagcgcatctcacgcctcctcagcctcccgagtagccgggattacaggtgcacaccaccaggccaggctaatttttgtgtttttaggagagacagggtttcaccacattggccaaactggtctcgaactcctgagatcatgtgatccacacacctcagcctcccaaagtgctgggattacagacatgacctcaagcctatttcctgtttacacacctgctttgccctctagacccgaagtgcccctttgcttctccagcagccctaagtcaaagtcaagttctgcttaggagtatccagcattcagggacttaaaatatatcttcctctttgtcttcattagcagcagcagcccccacagcattgtggtctatgctttccttttttttttttttttttgagactgtctggctctgtcactcaggctggagtgcagtggcatgatcttggctcactgcaaactctgcctcccaggctcatgccatcctcccacctcagcctcccagatagctgggaccacaggcgtgcaccaccacatccagctagttttgtatttttagtagagacatgggttttgccatgttgcccaggctggtctcagaactcctaggctcaaagccatccacccgcctcagcctcccaaagtgctgagattacagtcgtgagccactgtgcctggactactctgtgctatttgaaccaatatattatttctaagtcctcatgacagtctgaggaggtaaaggtctgctatcatcctcattttactaacaaattgagcctcagaaaggtgaagtctcctgccccaagtcacacagcatgagtggtggagtcaggatttaagcccaggtctgtccccctgacagcttgatctctctgtactgagccatggagctccttcttggaggcgtgaaatgctccccatccttcaggagacaacagcaacagccagccactccttgtccagtcagcaatgctggaatacctctgcagctcacagtccaacgcccacagccttcgagtcagtttcttgatattcggcaatgcactggactcctgatcccatcagctcctggctgaaggtgggccaacccttccccatttccttcaattcaaacatttcctcatgtccctcagtgccaagccctgtgctgggagctgaggacccagaggtgagctagatctaaaatctgacctcaaggagctaacagtctgagaggaagactggagtggataaaaataccttggtaatttatcacttaataaatatccaataaatgctattatgtgccaagccattgctaagctcagagaatacagtggttaaaagcaacccatagagcttatagtctttgggggagaaataatttttaaaagttatcaactagcagggcatggtggcatacccctgtagtcctggctcctctggagggtaaagcaggaggatcacttgagcccaggagttcaaggctgcaatgagctatgatggcaccactgctctccagcctgagtgacagagcaagactcaatctctaaaataaataaataaataaataaaataaaaaataaaaagccatcaaataaatatgtaattctaagttaggaaaagtgatttcaagaataggtagaggaggggctgggcatggtggctcacacctgtaatcctggcgctttgagaggctgaggtgggagagttgcttgacaccaggagtttgagacctgtctggacaacatatcgagaccccatctctacaaaaaaaattgttttaacttagctgggtgtggtggtgtgcgtctgtagtcccagctactcgagaggctgaggcgggaagattgcttgaggtcgaggctgcagtgagctacgatcatgccactgcactccagcctgggtgacagagagagaccctgactcttaaaaaaagtagaaggaggatacctgatgtaaacaaaggatggcatgttgcagaaaactgtcccaaggaagtgacatttacatagcaattagacacagtattctcgaggcaaagaatgtgaaggaagacactccaggcaatgggaacagaggaggcgatggccccatggaaacaaacagtgtggcaattccaggatcagaaaggaggcctatagagctggagcagagtgaacaaagaagagaagataggagacgaggtgtgaggtggagaggcggccagggccagatcgcacagggccttgcaggccaaggtaagaatttgggacttcaagaacagtgggacacctgagaaggtttcaagcaggggagtggcatggttctatgaacacttttgtgacaatcctggctgctttggaggccgcagtgaagaaccagaggatggagtgtgggggtcagcgtgaggaagctgatgaattccacatcaccatcaggtgatgatgacaggaagcaataattggtgattggctgaatgtggggcatgggagtcacggagaagtcaagaatgaggtccaggtatgttaaagtatctttcctggcacagaagattggggcaggtggaagagcttaagctcaggtaagaaagatcagggtaggacctgaggtcctgaaggatgaaaggaagggcaggaggtgggaaacagcattcaagggggttgccaaggttgaagaccccaaggtggagacaaacttggctttcccaagtttgtcctcaagttcctttgaggttggatttgaagttgcaggtggaaggcttctgcgcagaagcattctgtgtaaggaagttctactggggacaaatgtggggaccggctggtagcatggaatctggagacaggatgaccaatggggaggctgggacagtggtccaaggcggcaggggagaaaggagccatgaggattaggatgaggatacatattcaagctggagtctacaggaacaggatatgagaagtgggtgctgggctggggtggctgggtggatgcgaggccatcactgaaagacacagtgagaagggaagcagggggaagacacttgggtcagttccagggggaaagtcaggaagcagcatcttccaagaagcaaggtctgtggaccagaagtcagcagatgcttaacaaattcacatggatacaaacattcctcatcatatctccccaccacagccaattttccacatccaccagaattcccagttcgcctcatgtaagaaaagaagcactgtgatgtggctcaaagaagataaaagaagactaactggccgggtgtggtggctcacacctgtaatcccagcactttgcaaggtcgacgagggcggatcacctgaggtcaggagttcaagaccagcctggccaacatacaataaaaccccatctctactgaaaaatacaaaaattagctgggcatggtggcgcacgcctgtagtcccagctacttgagaaactgaggcaggaaaatcgcttgaacccaggaggcggaggttgcagtgagctgagatcacaccactctacttcagcctgggtgacagagcgagactgtctctgaaaaacaaaccaacaaataaaagaagaccaaccagtccctgttctgaaattcgccctctagtgacctagggccagccccctgaactccctggacctcagtttccccagatatatgtctgagatgggctggagaagcactctaagacttcttccagcttgaacattcttttattttattttactttatttggctcactgcaacctccacctcctgggttcaagtgattctcttgcctcagtctcctgagtagctggggctacaaccatgcgccaccatgcccagctaatttttgtatttttagtagaaatagggtttcaccatgttggccaggctgatctcaaactcctgccctcaagtgatccacccacctcagcctcccaaagtgctggaattacaggcatgagccactgtggcccggccccagctctaacattctgtagcttgaaagaaacaagaacgggtgagatggactgacggctcaactggccattgacaaatagggaggtaaagcatggccaacctactctaaagaggccctggctgggtatactcggcaacccacttactcctcactgtcatcttatgagggagagaccattatcatcctcactttaaagatgaggaagctgaggcccacagtcacacaatgaggctggagtgaacccagaggcttgttgaccccaaagcttgtgcttcagctgttttgttgagctcactgctcctcaacctggcttgtgtgagtctcattcagactgcagatcccccaggaacagggtcccttggcatccactgccatgtgctcaccagggtctctgaatgacctgtgggagcaggcgcctggccctgggtcttcctcaatgaggctctgcccttggcccaggagtccctagcccccttgctgctgcccccaggctttccacagcccacatgcgcacttcctgttctctagctcccactgggcgcagcaccaactctgcaggctcagaggccgccgctgtcatcccagcgcagggagctgtccaaaggctgaaaagcaagagcccatggccttggtccagagccctccagtcctgctgcccccaggacaaacccagtccccttactgtggcctccagggccctacaggacctccccgctggccacaggagtaccacacctcagccacactggaggaagctaattttgtccccaacatggggccttcaaccttgccagcccccttgaatgctgttccccacctcctccccttcctctcatccttcaagactccactcaaaggccactcctcagagaaaccctccctagtcatgctccactccattcccagttttatttccttcagagcactctgaaattcaattgccgcctatttgctttactgtctctttcaccctctaaaatgtaagctttctgaagacaggtgtccttttctgtcttgttcactgtggtattcttggtgctttaacagtgcctggcatatagttgatgcttgaaccttacttgttgaatgaataaatccttccaggcacccatggtccacagaataaaatccaaggctggctctccaaacccaagtggatatggtgcctctcaacctcctcagctatctcaccctcagagctcacctttctcctctgttcaataacttgggctcccctatgtgtcccatccctcatgcctgctttgtctgccacaaattctgtacacaccagcctctgctcaaatatcctctctctggaagccttccctgacctcagtcttgccacagctccaggtagtatccccgggctttagcactaattgtactgcactgaatcacttcccaatgaggctgtacctacagactgtgagctccttgagaagagggctcagtttgacatgttcttgtagactcagcacccagcactgggcctgcatttagctgaggctccaggaatgtttgttgggtaaggacaactgccctgcagatggttaaccatctatacaggtgaacataatgactagtttggtagtcaatcagatgagggtttggaatctggttcctccattcatttgctgtgtgaccctgggcaggtgacttctctctctaagcctcaagctcctcatctgtgaaatgggggcagtaaaattggctgacaggaacttaattaatctttttttttttttttttttttttttgagaaggagtcttgctctcgttgcccaggctggagtgcaatggcacaatcttggctcactacaacctctgcctcctgtgttcaagcgattctcctgcctcagcctcccgagtagctgggattacaggcatgcaccaccacacctggctaattttgtattttagtagagacggggtttctccatgttggtcaggctggtctcgaactcccaacctcaagtgatccacctgccttggcctcccaaagtgctgggattacaggcaagagccaccacgcctggccaggaacttaattaatcttaaatttaatatttgctaccatgccctaagaacaaacatgttcactaactacatcaagatttgaggttgagaaaaataagaaacagtctagatgccaccgataggacagtggctaagtaaattataatacattcatactcaggaatactatgcagttatgaaagagaatgagactgatctatggattgcggacatgaaaagttctccaagacactgttaagtgaaaaagcaagttgcagaacaatttatacaacttgatatcattgatgtaaaacacatacatctatttttaaaaactgtatcttttctatgggcgtacaagtattaagcaaatgcagaaaaaatggtctggaaggtaactaattataacctcttttgtagtaacttcagttttggtttgtttgtttgttttgagatagagtctcactctgtcacccaggctggagtgcagtggtgtgatcttggctcactgcaacctctgcctcccgggttcaagggattctcctgcctcagcctcccgagtagctgggattacaggcacgtgccaccacaccaggctaattttttgtattttcagtagagatggggtttcaccgtgttagccaagatagtcttaatctcctgaccttgtgatcctcctgcctgggcctcccaaagtgctgggattacaggcatgagccactgtgcccggccagcactttagttttaataatgagattgtacttgttttttggtgggggtttggggtttggggggttttttatttgtttttgtttttgtttttgagacagggtcgtctcactctgtcaaccaggctggagtacagtggtgcaatctcagctcactgcaactgccaccccccagcaagcaatcctcctacctcagcctcctgagtagctgggaccaaaggcacatgctaccacacccagctaagttttgtactttttggtagagacaggatttcaacatgttgcatgggctggtcttgaactcccgggctcaagcgatcctccctcctcagtctccctacatgctggggttatagtcatgagccactgtgcctggcctgtactcatttttttaattaaaattagaacatattaaatgatacacatgcagaaaatcaaataaatgattatcccaaaagtgagaattgtagttacctccagcagagaggaaggagtatgtttggaaagggacacacggggtggggcttctgggtgcctttgacatctccacccaagtggtgaatgcacagatgttcactcgatcaagattcattaaactggccaggggtggtggttcacacctgtaatctcagcactttgggagactgaggctgggtcacttgaggccaggagtttgagaccagcctggccaacatggtgaaatcctgtctctgctaaaaatacaaaaaattagctgggtgtggtagtgcatgcttgtaatcccagctactcaggaggctaaggcttgaacctgggggctgaggttgcagtgagccgagatcaagctgctgcactccaccctgggcaaaagagcaagactctgcctcaaaaaaaaagaaaaaattcattaaactgtacattaacgtcttgtccaatgactgtgtgcttcctgtgggcaggggccaatcattgcaatatcatctgtttccccatccccatttcactgcccagaaacagacttaatataagttgtgtgctcagtagggagtgcccatcacggcaagcgctcaggagggccaaggccgctgtccagggtactaacgacccaagcctgggaggccacagagaaggccagcaaagcgagccagcttcaagatgcctcattctgaagggcccctgcccacctcaactcctctctccccacccccttcactcacttcctccaagctgtctgcctttctgttcctgcaatccacgcccgcgcttcttcttgcctcaggacttttgctcttgcccttcctcctgcccagtgcagtccttccccaggtgttcctaaggctcgtccccttacttactccagaattacacttaaacaccccctccacagagaggccttttgacatcctgtctcacatggcacttctcatcactacgtcctctaccaggttgcactttcttctagcactttttgctgtctcaccttcaagcctcgtgtcacgtgcttgtttattacctcttttcccccaaactgaatgtttatgccagcacagggagcatgtgtgtcccattatgtctcatcctgtcttttagaaggatcccaggtgcacaaaattggattaatcataatccttggttcacagcgtactcccatcactgggctggatggagccctctttctctatccattcacttattgttttacttatttttaataatgagttaatgtgaacccacattcaccattcagattagaaccatgataataatcatactagcctgtgtctgtcctcttcactgctgtgtctccagcacctgcaacccaggaggtgcttggtattgatttattgaagaagctgacaaaggggcaatgacctccacaccctgcaaaagggagctaatgggagtgcccacctggcctcacaaggcgggagaagaaggcaaaggccaggccctccactcagttcccctgtcctcccctggtgctccactcctgctcagcctgggcaagcgcctcttccacacgattcagttccacatcttcagggagggcccactgtgccagaccttgtgccaggagctagggacacagggtggctcagcttggccatgctcctgaggagctctcaagcctcgatgctccaggcccctagaccatcccactattctactaagtaacaagagcagctacatggcacctgctctgtgcaggcatatgttatgtgtattctttgcatcatcttttggcatcttcccaacaattcactaaagcaggggctgttattatccacccccttttcagaggagcaccccaaggcgggtcagagagggcaaggacttgcccagactcagtcatgggcaagccaattccagagcccagctctccttgccccaggccttgctgttacactgatcccatgcacatttctcttcctccaaagtctgtgaagtcctgggcctcttgcatctctgcaaaagcaactgaggatggctgaaaaggtgtcaactttagagtcacataaataggtagttaagtcccagctgtggggctaggtgtggcctatgtgtcacttggcccatgtgtcacattcctgaggggatgaaattaaaacaaaatgtgtattttttactttatagttgaatgacactgccagaccacaccaccagtaagatagtatgcattttgttttaataaatcctgaaatgaccttataaatatcagttaacgtggcattttattgttgtcattgctaaaagcacaggtctgtaaatccatttcagtattccttcgttcttagtacactaggaggctcaagaattagaagctgccttggcctctctcagcctctgcaaagactgctgagtcctagctgtgcaactttgagcaaaccactcagcctctctgtgcctctctcagaactgtgcggaccctgagcagcatccacagagggccctgcctacagaaggtgctctacattgattcagaggagtttaacttaacggaactgtattagcccagatcgcatgagacacagtgcctgtcatcgttgaagcaaactctgagctctggacatttgaaggaaagtgagggatcaaggaagaagtctaggttgttgttgtgacaaccatttactgagatggacacaagctcttggaaaagcttgggagagggaatcaagagttctgctttaggctgggtgcagtggctcatgcctgtaatcccagcactctgggaggccaaggcaggtggattgcttgaggtcaggagttcgagaccagcctgaccaacacagtgaaatccgtctctactaaaaataccaaaattagctgggcatggtggcacacacctgtaatcccagctactcgggaggctgaggcagaagaatcacttaaacccgggaggcggaggttgcagtgagctgagattgcgccactgcactccagcctgggtgacaaagcgagactctgtctcaaaaaaaaaagagttctgcttcccaggaggtggagcttgcaatgagccgagatcgcgccactgcactccagcctgggtgacagagcgagactccgtctcaaaaaaaaaaaaaaaaaaaagaaaaaaaagagttctgctttagacaagttaaagagaagccctccacctactattaatatttagaagcattttctcactgaatcttctcaatactctacaaaaaagcattgttaacatccccattttacagaggaaaacactgatgcccagcaaagttaaatcacttggctggagacacagatggaaccaggattggcacccaggaaaccggactccaaagtccacattgccatccactgttctcttcctctccctcaaacccttgcccaccctgtcccattggctcagcagaaacactggccttggacctgggctttgctgtctgagacatccatgtatctcccatccccgtccccagttatggccttctgccaatatgaaccattcactgagtgccttcacatcacctgcccaccttgattcacaacaattctgggatgcagattgcacaatgctccccagctccactttgtggggccctagcagattctccgagctcatacagaaagaccagctgtgaggggagccaacaccttcaaatctactcgctccctacaccaccttactcagagctcacctcctctgtggagtctcctaagggaaggcccccccattcacatctgtgcaagatcccggtctggcaagaaacttctcagtgccaaccaggcactttagggttcacatggagaacattaaatataagcaacccaggcatctgcctcatggaggcttcctgcagcctcctagggaaaaagtagcacctgacctggtaagaggaaaagctcaggtttggaagggtcagactctcactctctgctctccacttctttgagccttgatattgtcaccaattccaaaagcgctgtctgattcctccactcctcccactgcagtccaggccaccaccacctctggcctgagtgacttcagtggtctcctccccgaaggtgtcccttcttccatgcctgtctcagatagtctcgtctccccttggcccccaaagggggtctttctaaaacgtaaccaggtggtgtcactcccttgcttaagattctccaggagcttcccatgcatttgggaataaaactcaatcaccttaacccaacctataaagtcctatgtcatctcacccctgctgacacctctcatctcttcccccatcactcacctctttgcctaccctgctccaagccatgctgtctcctctctgttctttaaaccatgctctttgcaaccccaggcccttcgcatgtgccattccctctgcctggaacactgttcctgtgctctttgccccattaaatcctactcgtcttttaaggtttggcttaaataacttgccctctctcctggctccctattctagtttattctttgggatagacttatcagttcctgattttgtatttgattgatgtttacacttaaagatctgcatcttctctagttgtcaactccatgaaaatacaccatgctggttctgctgcctgctacatctttagtgcccaacaaacgctgggcacatagtgggtgctcaacagacaggtggaatgaatgacttaaatggatcctgcatagggacaagcacctgaggcagagtacttaagtcttcgaagcctcagtttccacttctgtaaaatcaagataataattcctcctttacaagatagtggtgaggatccaaatagtcaatgaatattgacagtgcgttgggaaaaaatcctctgcaaatacaaaagcttaaagacctggaacctagaggatgggcaggagtcagagagaagagcaacaggaaagggcatggccatttatcaggtgacattgtgttttgtatttcccctttccctgacccctatgaggtagtagttatgacccagaggaggaaataaggctcagacaggagaagcccccttcccagggtgtcatggtgagtccatggaagagccgggatttgtacccctcacactgaggcaggcaaaatggtcattgcaggagaagcatcccctgatctcttgcccccctcttcatccttcgcccccaaagccctcacctctttccaggtttcctggtcttggcctgaatctcatactcctcagctgatcctgccaacctcatctccaccccaagacccacccagccctgccccagctgacacctggttcttgtgctcacatcctggcctttcccacatggcccagagggacctttctgtcttctattaggaaggccttgtactaattggaaaacttttgtttgacggtaatgccaaaaaattcataactagtgaaaagtaagcactgtttcaggcataagcaagcatatagcatgtgggtaaatacgtgggtctgtacacgcctttgaaacacaaatgccgtcttcccacatcagagggatctctctaacacagagatcctcactcccctccgcaaaccaggtagctgtgaggccagaggtggggaactgtgaaagctgcactaatgtagaccttgttggtgttgggtggaggtgactggtcctaggtgaaggagagaggcttggaaaggacacccagggtcatcctgagatcctcctcatcctccaaatgcccccatctgtcaacttcccctcaattcaacccaaagatgtctgaatccctctgctcctccggctgtgcctcccactcaggacttgctcctccccaccccaccccaccccagcctctactgttgcacgggttcttcctcacttgctccacaaatgtcccttgaatcctgtctgtgtggcaagcaatgaaccagacaccagtgatgtcacggcccctgctctggggagctgacaatggacatggacccaggcgtcttgaatccacgccccatgttccttaaagcatgaccctggttgggcctcgctcccacccagaccgagaggaaaaatcttggcaccctagacctgcccacgtctgcagcttcaccttcccaagccaccatgagaaggagagaggaggggcgaccatgttccccagcctgaagatcctgccctcaactccctccctaggagacagaggaccctgggctttcaaggcaacataatccacaggggaggccgtaaacacccttggagtagctcgcttttcaggggaaaccaaggctcagggccagcatgacttgagcaaagccacacagcgcgtctgtggcagacagatgggccccacccctcagttcccagctccatctctgcgagtgtagacttgtttgaacttccctagacactgacactgccaagagaaagaagaggggcttaagaccctttttctgcgtgttctgctgatgttccaaggacctgagcctccacttctttctatggctgtgggaggggagatgaaccaagagagatggggctagacaagggatgtggggcgcaggcagggtagaaaaagacagagtgaaaagcatacagcagggcagagaaaagaggggtgtaaggaaagagtaactggggactatcaaggtagaacagagaagtgtatgggggtttttaaatccctggagggagaggcagcaataaaggaaagagagtcagagtcaaatagagagacagagacaggaagatgcagataaagaggtagagagagagaacagcagaaagagagacaaagaaaacaggagagaaaagaaagagggagggagggggaagagcaagcagaggtggggccacaagggcctcctgtaaattgcttcccaacaccctctcccctgcccctcacaccagcagtccagcagggtgtgtggtgtcgtccccatccctgaaggggctgctccgggcagagctgagactgacacatgggaaggtgtccagctcccggccctctctcttttcctgcacccagctgcctcccaaagaaaagggccaagttcagtgtggaaggggcagagacaggccctgggggactgagagctgaagtgctgtaaccaggggcagagaggctgcagtctgtctcccctcttcagtgcctggtccccacagacaccctacctgttcttgtcccctgctggctgctgagggacaggctttggctatcctgactttggccaatgcctccctcaacctgtggccatcgtctccctgcctggtgaccccaacaccctcctgtacctcctcctacccatccctgtgccccccaagaccacccatcccatggccacctttctgctcctctgcaggtttggggttagggaagggagcacagaggcctagatggggggtggaaggcttggtggattattgaagatgtgcgggcactgcggctgacatggatgaggaggaagaggagggggtcttggtgatggacgatgctgatcctgcggtggggggaatggcaggggagggggtggagagggctgggggaggggtggtgaggaagcaggttcggaggggagcaggaccaggctcacatttggcattcagggcagctgacaataaaaatgctttattgccaagaaactggatcgatcggggctggagggggccggcaggggggacgcggagggctcagcgcagaggccggcggccggccttcgcagcgaccagggcccgagccgccctcccccctgcacccccctccctgcctcctgccctttctctctcctgcagccaccgcttagttcttattatattttttcttatatatttttcccccagcttctcctgctcctgtttttttattcttttaattttttttaaaactcgctgcactcccaatgccgcaggccgggtgggggtggggtgggggcatctgcctgggccaggcccctatccacagggtgcccagaactgctggctctgggatgagccccactttgcttctgtatcccccaatccaaccaggctcctcctagagcctgtcctctgtggatgcccatctccccctgccacccctccaaggggcctccttccaacctcagagtacccacacacacatatccatggtgggctgagggccctggccaggccttcctcccctcccccctacctggccccctgctcactcccggagccatttggctgatggtcagaactgtctgtcaaggtggctctgagcccctggggacccagatgggaggagggagggggagaggtcgggggtcaggccacgtcccctcagcttgtctctttcccctcccccttcctaacaaagggagcatcggcctgacactggcgggatggcctggtactcagggaagcggggaggagaggggctgtggggatggccatgggcagaaggcgggggtgggggccgcctgcccctcctctgccctccccctcgggtcaaggctaaggtgattcctcaacctctcggaggctgggctgggaggagaggaggatctggacagacaaagaactggagccctggggagttgggggctggggggacgcacctgggaccagggcagtcctggctgagggaggggcaacaggcacccctctggccctgctctcaccctctggatggccctgcctcccatctgtaccaatccctacggatcccagagccatacagaccttccagcttgggcaaggtcggatgggggtggggggaaactgaggcccagagaggggagacggcccaggcccagggttctcagcgctgtcccagagtctctcccctcacttctcttcctactaagggaagacatcttcctctcctgccctcccccacccaggtcaggggaggtttggtgggggcagatggtagaaggttctatggagagggaagaggaggctgaggaaaaagtgaggctaagcgttctcctctcttaagccagtgggcaggggaggaagccagaagagaaaaagtctaaatgtgaccttgagcactggcctggcacagctgtgggaagaaacttaacgtccgtcagaaagggcaggaaaccaacatagacagggtgctcctgagtacctggctagcggtggctggggaagaggccttcagacagttttccccttttgcccatggctacagtgaaggaggaggattcacactctggttggtcacaatccacccatgacactgcgtcagggcctcccatccacccagcctgactgtggggcgcaacgggtagctgaggcaatgaacagctgtgagcccccatgcccacagggatatggagcctccaaagagacagaaggaaacaggcagatcttctgtgcttaaattctcctatgaaggctgaggtgactctcggggagagggccgcagcgaagaagaagagggggagaataaggcgggcctcttttggagggggtgggatgggctcacacatgcccccacagcctgccaagaaggccccagatgggccgaggactataggggtcccggctgccctcccccaaacctcccctcccttctctccctctctctttctcggctggctatcgaccggggctgtgacatggtggatcaatacggcagggatataaagccggctggctggctgcctgcctctgcctctctctctctcccttgcttgccttgcttccttttcccggagccgcacccaggtcccccaccatcatgtaccccttacccaggcctctgaggggccaggcaccccccaccactcccctacagcaggagagcttagggaggctgagagcttggacagccgggagagggggtgagtatgggagtgggcaaggaagcagatggggatgggggccatagtttcaggtaagggggctgggagaaattgagggacaatttctgggagaaagcaggcatcccctcaattgggagcagctcagaaagatggggccctttgaaggtgtgtgacggacagagctctgggaggtgggcagggggcacctgtgggttcagagagacactgtcctgagcccatgaggcaggggaaggtctggggtgggtgctggagtaggctacggtgaatggacacaaagaacagtggggcgaaccctcaggccggcctgcgcccacccccagagctgctggctgccccgcctttgggtccctgcgggtagaagttgccttggcctcaccccagggtctggcctgcacatgtgtggttggggtgggaagcttgtgcggcttcggacaggaggttccagcgagaggtctgtggtgtgcgagctgccatggacgcagggtgtgcatgtgtcctcaggctctgctgggggattctaggactgcacatacccgagcgtcttggcccgagtcatgtctgtgtgtgaacatgagttcatggatgtgtcccaggagcactgggtggctgtgtatgcacttccatgagtgtttccctgacgctaagtctctgtctgtcccttggggatgtatcccaggaacacctcagggatctcctctgtccccagttaatggggtagctatgtgttcccatgtgctctgggaagcctgtgtgtgttggcgtgcgcatgcccctgacagagtgtgtctgagcacggatgctgctgtgcgtgagcctccatgggtcccgtgtggatctgtgcctgtgcctgtgggcagctgcgtgtgcttcagggatctgcgcggtggtctctatgtgtactggaagcaggttctcctcatgagtgtcggagagtccatgcggtttctctgtgtgtctatgtgatgctgtgtgtccctgtgtgccgatggtcgagtgtgtttccacaagtgggctggaggctctgggtgtgtccctgtgtgtgtcatggtgacttggtgtagacggcacggtgtatgtgtgtagaggctacaaccctgagtctctgagtgggggagggtggcgaggcagcaggggctgccacggagacactggctagccggttttatcactacatcatctccaaatcccaatgtcagggcctgcctgccttctttcccttccctgccagagaccccagacccctgccaggatgggcccaggcccccgtccctcccccggcaccttgggcaggctgtacctctgctcctcaacacccctgctttggtggatgccacctcaactccaccaagcgacctccgtccctcccaacccccccagcgccacccgctccccccgccctccccccaccacaagtccagtccaacccagacaaaagcaattactccagaggtaggatgtgagtgtgggtgttagaaacaggaaaaaaagggggggacagggagggggagcgagagagacacaaacagaggcagggatggacagccagagaccccgagagacgacaagagaaagagaacggcagagtgagagacagaggcacacgcagagagatgcacagagaagcagagacagaagatgaaagagactggaagggacacagacaccaaaaccaggaggcaaaggcagagaaaaagagcagaggaagggcaaatgcagagagcacgacagagagagacgcagagacagtgactggagagacggagagagaaacagagaaagagcacacaacagagcagaaaacccagtgatggagccacacagagagaagacgcagataaagagagaacgggggccagaggcagggagaactagaaagggggcaatgcacagagaggaacagaaaggctgagtgagagtgagagagaaaggagaccagagagataaaaggcagacggcagatagtggtggaggggagttggtaacccactagagactctgagatggcaaagctagagagaaactgaaaggggatcacgtccaaagtgatgtctctcacacacacacacacacacacctttctccccattccccaggccagaagtcagggatgctcaagcctttttccacgttcctctgggcccctgtgagccacggtggggaggggacagggtgaatggacagggatgatctcaggtagcttcagggaccagccagagccgactgggacctgatcacatgggtagggagagcagtacatccctccttaccacacaccgccacctcaccctccacacacagtccacacacaccagggccttggccaatttcctcgtactctgccaggcatggccagcctggggggtggggggccaggtgtgaggtccttccttcctgccccacagtcctgcccacctgcctcagctgcagctgccccgcactgttttttctttctcattgtcccctgccttcagcccggctgccttcatctttctctgatgcactctcatgcgctcagctcgcatgcacgcgccctctctttctctctgttcctttctgtctctgagtccctcactctgctttcctgcctctgacttttctgctgtttcctcttcctctttgctcctctccgttgctctgttcccctctctgtgtttctgtcatgaggtgcatgctccctgggtctccctctccctccactcccatctggtgtattctggattcccctttcttagacaatccctctggccctcctatccacctcgtccccaagaaaagcaaggttgggcacagtggtcctagcctgtagtcccagctacataggagactgaggcaggaggattgcttgaaagtttgagaaaagcaagggtggatcactgtgtaaaggacctcagaagctgtcctggagtgctaggagtgggtgaatacttcctttcttgtttttccctcaatcaccttttatcctcctctctttcctaccccacctcacacccaccccaggccggatctctggatctccccagcctccagatctcagtgtggctctctctggagacaaaagctaagactcaacccacaggcaacactcaacacagagatccagctcagaaaaaaaggagctgaccagggaggaatggagaggccaagacacataatgaagactaagaaaaggaagaaagatgatgctggggctggagccaaagggagaggaagaggaaaggaaggaaagccaggggcagagacctggcagggcagcgtgagcccaacaaccacggggtgggggtggggcgcgcatcaagatttctaacaagcgcagctgaaaacacccagggccgttctctgaggccttctctctgcctaccagccctcaccagtgcttcgaagagccctgaggaacgtctctctatttgaagtcagagccgagtgcctgctctcggcacctggggctccatgcttaccaggatggtgggtacttgaccttcatttgctgtgggactgtcagggattccagggacccactggtccccgaactggctcagagatgcaagccatttttacctcctacacatctataatccccaccccatggctgacaaatattcccagtccacagctgtctccacccacccagtgacagagcacaggcagccaaaaggatcaagcaatctcttgccacctcccagcaccccagaatgctaaacagaccctcacatctggactccacatccagcgaggagtgcccctgcccaccacccagatcacacagctgccagttacagaccaccctataggtcccaccacacggccatagcccaccagcatcccagagctgcctctacactaaagctctgtcccagcccagccatccttcaagccacatctggaatagcacacaccctattccactagccaaagcccccaggggtgtaattcagaaggaggcagactgggcctggggcatgtggacaagtccctgacaccacgccctggcttctccggcttgtctgaagaacctgaactgcccttaaggcctgcgcctcccatcccagggcagcccccccgccatacctacactcttggccatgggagaatgtcctcatgtgcggctaaacatcctcctcatgcagccttgaattctgttccttccacgtcacctcaccagacccaggatgaaagccgctcacctagagcaaagcttctgcttccgaggcattcaggactcccctcagggtgtgtgagcaccctggggcacatgcctgttgcttatgtctgggttacctctgtgaccctgggaccgctccacattgaaggccgttgtgtctttttgtggaaggatggaaggacagaagggaaggagagacaaagtggtaccacagccctgttcttgccctggcacttggagggcaccagatacccaggggactgtagctggctgtgaggactctaaggccaggccagcatacacagtccccaatagtgagtaggagcccagtcagtccacaccccttcccatccactcgaaatgtaacttagccctcggcttctccttacctttcaggagttctctccttacccccaaagacttcctgaggaccccctaggccagccagcctatccctctctcccctaacccagcatcctgcagtcccctggttcagattggtggtgtctgtgcctgaacccccacgagcctgaaagcccctcaaaggccacatgggtctcccgcctctctgcatctccagatggtggcacgaggcctagcacacaaggaatcccagaaaatgttggctgaaggaataaatggatggatctaggtttatgtgtctgtttgctcacttatttattcattcagctcatgcttgctgagcacttacactgtgccagggactgagtatagacagatgtgttagacaaacagagaggtcccctcacccagaggcttctgagagcagacattaaccatatagaatataatcagatacggtgatagtgctcaggagggaaaaggaggcatcatccagcccatgggtcaagaaaggccctcagagttgaggagccttagatggggagctgaggaggtagagaagtgaagccaacccagagtggagagaaggccctgctgtgggtgggaggagatttggaggaagggccagaagggagaggaggagggggagtcacacgggagcataggcagcagaggccaccacaaccccagggctgggagggggtctctcactcatcctggggctccagctcccacatagagcattgaggaggcctccagacatgtttggggcatcactcaccttccaagtgtggctataaaggaaagacagagcaggtgagggcgatgtttattgtagttgttgtttcgtaacaaaactatacacctaaaagagtatggcttccttcaaagatgtctcctcaggaggccgaactttttcttgaaccacctgatattttggcaacagccttcaaggccagtttacaaactccatcagcaaagcatctctctagtgtataatcatctctagtttctattgaaaaaccaacaagtggccccagtattatcattgctaaattcatcagagctgctgctaaatcagacttcaggtggtctccgaaatcaaattcactcccaaagtgcaaaaatttgccacactgtggagataccaaaaacaatggtgggttttggtgaggtaaaagaatgagagctttaaggtcaggcaaacccaggttcaaattctaactctactgcttacatgttgggtggccttaggcaagttgccttcacgctctgtgcctcagtttctttgtcttgtaacaggtgccaacacccacttcacagggttgctgtgaggattaaaagcaaagtgcccagaacaggcccttgcacaaaggtggcccctaataaatatcagtttcctcactggaatgtaccagccctgttacgtgttaccaagtcagtcacccacatgtccatgaaatcatggatatttaatgaacatctatttgaagacaaataattgaaatcatagacctaacagtgacctctaccaactggaaacataattaaacccctctgttacttcagcccaactttcagacgttcctcaaagccagtctctagctcccaaactaattctgcaacctggaaattccttgactctcttttcgaggatgtgaggattcctggaaaaactgcaacttcggttccctggagaaagcactctagagaaatgacacatcctggaacaaacactctcagcgataacaggggtccatgaatgagcttcagggggtctgtgatcatcccaaagtgtagcacaactgggcaaatgtaggtatgtgttttcctgggagaagctctatactgttgtgaaactaggtatctatgggccaaaggttgcctgaaatatgttgtttggaccacgaggagattttgcaagttttgcattagttgccaacatttaaagattggaagacttcacacacaagtctgggttcctggcttctcttgaaaaatcagaaaccctggcaagtcagggttgcatctgtgcatgagaacagtcagtggagctaaaaagcagtcccccaccccatgcatttttcagtccatcatagtccctacaatgctgggttgcaaaccctgggctacagcttccatctgcttcttaaaatgagactgtgattcctggtacagcaaaggactcctacccaggagtcctacaagggcacccaaaggcctccctggggtcctgagacctgtgggttaagcttctctggtgggaataggggtggcagtagagggctgtcccaccccagaagccctgtccaccctcctccctagatgctcattgccagggcctcaccaagcaagctggagcaaacaccagggcaaatggccagagcccctgcttcccacagaggtgagcagcaggagaactatggcttctacctgggagtctcagtgggcttcagggaggggcttcataaaaccttctttgttcaggggaacgcttccagccatattttgagctcccacttcctgcagccacacgatttcaaggaataagtactttcatcttcacgccacctccatgtggtaaatgctattaattaccctcctttgacagatggggaaactgagccatgcccaggatcactcagccacctggctcttcttcctctatctccttttgctctcaggatggcacttaaggtgggttctattagtattcccatttacagacaaggaaatggaagctcaaactttcccaagtccctcgaagtcaggaaaagagattcgaacataggtgtgcttgaacccaaagctgtgatctgagccaccgagttacccccatctctctcctactgagccgtaacactgatcagcagaaacacccacagtcatcaacaccaagaaccactggtttggcccgaaagccacaggatgcatggagggtgagaacaaagcagtcagattctaacctctgggtgggcagagtggagaagggcagcaacacacccagggtgaggccagagacgaggatgggaaagcagagacttctgtgagaaaccagaaggtgcatcaataagcaaaactctaaggccgtggtccttacctcttgggcagacgcagcgaagctaatacattcaggccaccaacccggtccagtcgagaacctggagagagaggagaatgcagtcaacatcccggagaattccccatcctcatgcaggatgatgcactcctccagtggaggaaccctcctcctgtcacatcatcaggagctgcagttggctaactgtggagtcaggtgcctggaactcaggtccagtcagccacttgttgccttcagtagtcacttctggcctctgagcctctgtgtccccaactcataaatgggcatactagtgcctgccactgtggaacatctgtttttcccatcagactggaagcttcttaaagtgcagggactgtaactgtgtcttgaagcttttgtgtttggcagagggcctggcaaatttgagatgctcaattagtgcataacggacgacggagtgaatggatgggtggatggaggaattaactgattaaatggtgtatctcaaaggactgctacgaggaacaaatgagaaagaaatttgaaaaggttactcattattaagttcctatgtgctctggggagattaaaaataaaagtcataatgatatttctgacttgtacatttgtccattcatttgtgcatttagttcatcaacaaatattgagatttctctggctctgaatcaagtgtggcaggggacagagatgaattagacaaggtctctgctctattacggggctcacaggcaagttgaggagacagaaggaagagccaatgccaacatgctggggtaagcagagggtgctgcgggcatcctgggtgagatcacagaagacttagggaggaaacaacacccaagccaaacctggaagacaaattttaatcagagaaagaaccaggtgcaaggaacgagagaatgccaggactttgcctgtccagggttcagtaagaaaaatggggaaagacgaggcttccagattgcaggggctgctccctgcagggcgtcaagtgcctggtccaagcagccagggcttcgtcagagagggagagggatacaatccagtttgcctttggaaaggtccttctacctcctgtgtacaagatggagagaacagagaagtaggcaagaggtcaggaggcccatccccaaagagggtttgctgagcctctccacagccctgtaggaaggaggagtgaggaattaagggaggcaccagagttcaaaaggaggaggaggagaaagaaaaagatggactgagaaggagggggagagagaaagagaagagatggggagaaatagacagagaggaatgaagggagcgggggcaaagagaccagggaaaagcccaaacaagaagcaaaaggggggtaaaaagggccaagggtctccccacttcctcctccatctgtcctgtctctccctgggccttcatcttcaggggcagaaggggaccagaacccctggtccctgaggggagggaggagctggggttgctccccgctcaggggctgcttccccccagcccccgccctggagctaatcagcggctgtcatctccacagtgaggtcttggttaaggagatttagggccgggatcaataggaaatttaaaaatcgatgcagcgcgcagggcaaaatcgatggcgtttaatcgccttgccgattcccagtcaaaacaattagccgcgctgagtgttgaacacggtggcgacacggcattaaccgtcaatattggtgtaagtgatggggtgggcgagggaatccccaggcctcgggggggccagagtcagacagcgccttagggctggggtcttcccccaggcagtgcccccaccttgggcttccctccagcagggcccacacttgagtctccctgccctctgctacctggggctgtggtgcccataggcagcaccatccctggcatatctgcttccaactctcatcccatctcccgggttcccaaaccccaatatgccctccgacagaggggagaggatccctctcccaagcagacaacacctccaagtagagagacagtccatgggatctaggagctgtattcccagcagtgccttaagactgggagctatttagaagatgtcttcccccattgtacagatggggaccctgaggaacagagaggggcagcagctggcccacagttaccaggcacaggaagagtgggagccagaatttgaacctgatgtgtctgactccaaagcctacatttcctgcagctgtgcacataaagggtagattccagtgttcacagagggaaagcaagctcagggtttggtcctggcccctcaagtctcctcacagccagtgtatataatggtttgctgtgtcctggggtcagtttgccatgtacatggcagactgtgagctccttgagggcaaggcagggcctggctcctttgggggtccgaagcattgcccagcacagggaatgaccccaagccagggcttgggacaggcctaagaatgatgacgccacttgcccccacagacacagaatgcccacatacaaccccaccgatagacagatggaaacactggcacccacagacacatcagtactggcatttcctgagtgctggtcatgcaccaggggtgggtcattgctctgcaggtgtgatctctcagcatctcacatttgttcggcgagtgtcatcccatgacactgctgtggaaaatggaggctcagacaggtaaagtcacttgctcaaggtcacacagccaagtgggggcacctctatctgattggactccgaggggcatgggacatacagcaaacaagatctaacgactatgagcaagagaggtggatgcaaggagaaggtacaggaactgggcacctaaacagagaaccaggaatggcccacaaagggccatggggctcccggttctggggtgctgtgttgggagagagaggcttctgtggccacctgctccctggagcagaagaacaggagggagtgtgtgggcagaggaggaggcccacgagatgagccagggattgatctgacaaggtcctaatcaaatggtcaatatcactgacctgaccacttaacctattgataagctggcaaggatggagcaggcggtgagtgggctcagggaggggggcagcggaagggatgagggaagcctgagtgggcaggacataggccggcatcacgcctggctctggggcctggaagagggtggtctcctcctcaagggcccctgctgacacggcacatgtcttatgtcttggtggcttcctctacccaggcttttctctcctctcgggatccctcagtccctccctgagggaggccagggactgttgctggcacccaagtggtccccggctcccctctgactgtgccttagcttttcacacatgtgagaggcttcacatccaagcctcaatgtcttcatttgtaaactggggataattataataggggaaatcaaaaaccaacctagatatcatatgagtggggactggtacaataaatgatagtatagtggccatacaaagaaggactgtagagttgttgaaaacatgtttgaaataaatttttttttacacttctctcagctcataccatgaaataaaatcattgacaacgaaaccatgttcataatctgttgttaggaagaagaaaaggcaagttataaacaagtatgtagcatatcatcccgtttttacaaaatacacatccagatggttcccccaccaaaaataaataaatttggaacagaaatcagaattctgagtttggaccagtctggccaacatggtgaaactccatctctactaaaaatacaaatattagccgggtgtggtggtgcgcctgtaatcccagctactcaggaggctgaggcaggagaatctcttgaacccaggaggtggaggttgcagtgagctgagattgcgccactgcactccagcctggacgacacactgacattctgtctcaaaaaaaaaaaaaaaaaggccaggcatagtggctcatgcctgtaatcccaacactttgggaggccaaggcaggcggatcacctgaggtcaggagtttgaaaccccatctctactaaaaatacaaaaatagttagctaggcgtggcagcagacacctgtaatcccagctacttgggaggctgaggcaggagaatcgcttgaacctgggaggcagaggttgcagtaagccgagatcatgccattgcacttcagctcaggtgacagtgcgagactctgtctcaaaaaaaaaaaaaatctgagtttgggtcccaggtatctaaattttaataaattatttgggtaaactcatagccataatctcctttggagaaaaaaaaaaagctaagacagtcagggtgcaatggctcacacctgtaatcccagcactttgggaggccgaggtgggcggatcccttgagcccaggagtacaagaccagcctgggcaacatagcaagactctgtctctacaaaaaatacaaaaattagctgggtgtggtggcgcatacctacagtctcagctactcgggaggctgagatgggaggatcacttaagcctcagaggtagaggctgcagtgagctgagatctctccactgcactccagcctgggtgacaggctatctcaaaaaaaaaaaaaaagacagatagcaaaaggtaatgtcctttttgttgttcgtttaactagattatcatggtcattttcttctcatctcattgaatttctgttttctgttatttctacaatgaacatgtgtcacaccatttgtctgtaattgacagactgtggctaggtacttagtggaggcacctctagtgctgtttctctgcttccctctccctttcccagccaggcttgtcttatgtcttcccttatgtccaaacccagcagagttcagtgccctcaagaatgtgaatgaatttgaagtctgctgaatggagaagagctcactcctctggcttctgctctcaatagagtgggcggggtagtaccaagccaaatacagtcccctgtcccctcttcaggaaactggctgagggcttacagacaggaggaactgctggagggaaaacgaagacccagagggagggaagggattttcccagagctactcaactggtcatgacacagctgggaccagaagctggggatctgggctcctggatcagagtagtgccatccaactactgggagggggacaactgcaagaacaagtgtgcatgcagactcctgagataatgtgcacttctgtggggcagaagagcacagtgggtaaacatggggtcggccacttcctcactgtgtggccctgggcaagtcacttcacctctctgagcctcagtttgctcaaacatagcatgaagataataataacagctgcctcattttgctggtgtgagaagccaacaagaccgtgcttatagggaacttagcaaaaggccttacacacaaaaaaggggcaatgagtgggagaaattaatactattaccatcagcagccataaatgctgtgagtagtaagtgaaggtggtgggtaggtaagggagaaggtttgtcttggtaacctgagcaaatgaacaaatgcaatgaagacactcagctaaatatattcctttgttcattcattcattcattcagtaagcatttcctgaggccaattctaggccagatcccatgctgggccctgcaatccagatatgaacaatgagagctcccattaggttggtaaaggggaattaaggatggctggggatggccccttatctctgacagttgctgccgcaatggcccccaaactatctcttgggccttctgcagaaaaggatcgagcacaggagcacaagctccccatcacctgactggtgtgacactttgggtatgtgtgtgcacacactggaatagtaagctctgtgcagatggactatgttcacttttgtcattcacagcactgggcaccaggtctcatgctctggggacactctatgctcagagtttttttttttcctccgttttttaaaatgaacaacaaaaaaaagttcaaagcaccttgcacaatgcctaacacctggcaggtactcaataaatagcagctattattagcgtcatcatcacacgtgccactgctcttcatcccaacaaaaaccttattttgccaacaaggaaactcgaggcttaaaaggagtgatgtgactcaaagccgggtgtgtctgactccacagtctgtggtctcccctcctttgtgtctgggggcaggggccatcagagtgtatgctggaggtgaaggaggggaagggcagcagtgtgcgtcagggggtgagcagatctgacaatgggagtaaggaggagttgattggagtgaggggagggtcgtgagggagatgagggtgcaggatgggagcatacaggcccaggatgatgatggttttggagtctggctgctctgaggctcaggtaggaggtggactcacttgccaatgtacccctccagcactggtaagtgctcaccctgaaggtgagctctgccacccttgtctgacacagcagacgtctacctccaccattatattgggcaagcaggtgatatattgggcaagtaggtgatatattgggcaagtaggtgacaggggatccggcttcagttcatttgacaaaacattcaatgagcacttatcgtgttctgggcactgtgctacacactagggatacaactatgaacaacacaaagtccctgccatcgtggaatccaccttctagtggaggaagagatatgatacacaagaaaatatatttaagacctaagaaggaaaataaagcagggagaaagtggcttacaagatgctgctattggccaggcacagtggctcatgcctgtaatcccagcactttgggaggccgtggcgggcagatcacctgaagtcaggagttcgagaccagcctggccaacatcatgaaaccccgtctctacaaaaatacaaaaattaggtaggcatggtggcgtgcgcctgtagtcccagctactcaagaggctgaggcacaagaatcgcttgaacctcagaggcagaggttgcagtgggctgagattgcaccactgcactccagcctgggcaacagagcaacactctgtccccccaaactccaaaaaaaaaaaaaagctgctattttaaacataaaggaaaagcctatcagagaaggtagattttgacagctttcctggcaaaggaaacagcaagtgcaaaggccctgggtcaggaacaaggtttaaggaacagcaagaaggccagaatggcttgagcttccagagccaggagggagggagtaaaagttgaatagacagacaggcgctagctcatacagggtttgcaagccaagaaagatgttctaagtgtgatgggagaaatgacaggctctctctgtggcaggtgagggttggtctcaccctcacaaaaccaggctccagcctcacccattgcccatattgcctatggggccttctgacccattcattctccaagaacaagcccaagaagccctcagtaagccctcggagtcccttgacagggctttgtcagggtcaacctccccagactgaggactactctagaacatggaaagatctgcctcatctgggtgactgggcatgcagctcaggcctggccacaggaggctcagaaatcaatagaacgtcagtagaaagtaagggtgactatagctcctgacctccattccctagcaaatctccatttgggggcaagtcgtagcagtggccaagatatggggctgggagcaaggggaaggtagttctgtaccacctccctcaccagaccttggccagggttcccagactggacaggtagagcagaagtccttgtgactggtggcctgctcactggatcccttcctccaggggctacccatcctgtcctgtccccacacgaggctcagagagatcagacttggtacctggctcacatgctctgtctagtccctctcaaaactgttttgtggttatgtggtgcgccctgaataaatcccaagcctcacagtgcttcccagtcatgtaaagtctcctctcagtcctcctgaaggtcccgtgaccctgggcctcacatgattgctgggaacagtctaggcttgttcacatgtccatgcccttgcccaggcaagcatctccatttagacagtcttctgccttcttctctgcaccttatcaccctctccatgtctcctccttggtgaatcttcctgggctccccactcagcactgccccagaatgctttgtgcacctcatccagagcccagaatctgggccccaggtgaaaggatcccatttcccacctagggacatgccagaggagttttctagagggaaaagtgcggcatagtggggtaagggtaggggcatctgagtgctgcattatttatgcctgtgtgggctctgtgagtttcaggagggatatgtgtacacatttagaatctgtgtgttgtgcctgatgtcaagcttaaatgtcacttcctcagagatgttacacctagcctaccaatctaaaccaggttcttccgtgatgccctcctgtagcccctttttcctctccttaccaggtgtatttataactaactatacactgaggtctgatcagtgccagtcctgttggcttggagctcttagagagcaaggcccaggtctgtctcgtaaaccactgtttcctcagcttctaagacagggcctgactcctatagaggctcagtacctatgtgatgagttaattaattctatacacattttcacacttgaacatctacctattttgttttgctttagggggatgaggctagcctggggggtgtttgtgtgctataactcagggcatggccctttcggtcaccacgtgtggcctccctgtgggatttctgaatgtggcctgtgtgcacccacaggcatataggctgggatgctgccatgttttagtatttctattcgtacattttctattgaaaaacaaatctccacacgaggagcaccctggtgttttggtgtctgtcttgccctgagaggtctcagcacctatgtgcctgcacagacatctgggttttcatacctgtgtctgagtatgtgtttacccctgtttccaaacctggtgtgtccattttggcatctctgtggacaaatatacaaacgtctatgtgcatctgcagggtttagcatctatgaattttcttagggaatctctgaccaaaagtatgggtatctggctcccaggacccaagggtgcacatggctaccatgtgtttcagaatctgtgtatgtctcttgcaggatcattgcatgtgtctgcatgcttatgtatttcagtatttgccttgtgcatccgttcaagacttacgtggcctctctagtttggcgaatgagtgcgcgcacacgtgtgtgtgtgcgtgtgtgtgtgtgtcggggtgatataaacacatgtgcgtgtgtacctgtgtgtctttcttcccctcgctgctgcgccttcccagtctggatgagtaccttttctctgtctctctctctctcacacacacacccttgctcatatgtgccttgcagatggggagggggccggggtgtcagcgagctcctgtgtcacaaggttaatttctccacagccaggcaggctgggccctgaggggagtggtgggggaggggctggtccccacagcccctctgataaatatgtatttggggctgctgtgctcaaaggtcatggggggaaaaggaggaggaggggtggtctgcactgtgctgtgctgctgggtcccagccaggctcagcatgggttgtgtgacccccctccagaggtctgatgagattcagggagatgcccccctcatcctggtctggcccactccacccacatccatgctccgagggagatgctgctgtggacacacagatattcaaactctgaaacaggcaatcacacaagcccacacccgccgacacctagacagaggctcaaacagatgcacaaagacggcctcatgggccaccagatacatggaaggctcagagtgcagagccagacccatcgcttcttccccaccccaaccttcaacccaacgccaaaaaaaaaaaaaaaatgctcaagagtgcatagtgtctcacagtaagaaagctttctacacattcaatagacgcaaacacacacacggacccaaaaatgcagagtccaacaagaaaggtccctgaacactttgtgggtgggcatgtacacatagacgcacaagcaaacacatacacaaaggcacatacatagatgcacaccaggagtcccaaagatacaaagttctacgaaggtaggcacatgctgacaactgcagataaatgtatgaacacacatgcacacaaacatgcacacatacaaagaccccaagacacacacggcaggcaggatgcatggtggatccaggctgggaaacccaccctgctgcaacagagccggatctggccctttccccgctgaggcgagaatggctgcctggtctctggtcatgggcccccagccagcttcagccaaatgcgccatcatttgtccagctctgagtcacatcagttgtcgagcctcccctcctcgctgaccagccatctcggccatcagcggcctcggccattagtcggctcctgcctctggcctgcatttgttgaatctcccttacctggcagaaccgtccggaccaatggaacccttttggagtcggcctgaccttttcctcaagggattccgatgtaccctgttgtatgaccctcggcccatgcctcagggcgaccctcccctcagcacactgctcaggctgtcattcttcaatgaccgctggccacagtagttctggtggattgtgaggctgtgtgtttgagtatgtgtggaagtccgcttgtaggtatatgtgtatgggtggtgggatggctatagctgtgctttaagtcaaaatgagtgtgtgtgtgtatgcgtgtgtgtctgtgtctgtgtgtgaataaggggataggaagtcagcagctgtgcttaaagtcagagtgcctgagtatatggttgtatatatggggagatggaatgtcaggggctgcgcttcgtgtgtgtgtgtgtgtgtgtgtgtgtgtgtgtgtgtgtgcactttaatgcaggagtgacttggtgtattggcctgggcttggcgtggggggccatgaggggccgtgtctgttttgggcatggggggcagtgcggtacaggcatctgtttctcaagcagttgtgagcaagtggaatgtgcctctctcagactccgttgcttgtgtttgtgaaagtgacagatgctgcctccctggcctcactgcggcggattaagtctgtgaatgccacatgagtctgcaccccgggtgggggagggtccccagtctgctcttatacttgcgtgtgtgggccacagccctatactttataggatcctgagagtgtggactaaagtaacccccaaccttgttggtttctgtgagggagaccctgaatggatgccagaataaaggtccctgtgtgtgtgtgcacaagcacactcatgctcatagacaagtccgtattgtccaaagtacgttgtcacgagatgcatgtgtatatgtgtatgtgtgtgtgattgcaggcataatagctccccgctgccagccagatcaagttccaacttctcagagcagcagctgagcctccacagacagggccttgcaacattgtgccaacctctactcttagactacacctccaacctgggctgctttctcctcactttcctctgccatctttatgccctgccaccagtctgcttttctcagtatctgagcatccttaaagactcacctccctgtctaaacccacaccatcttcattccccagattcctaatgacctggaaactccctttgtgctcacagtccaggcgcccagaatcctgtctaaggctgggattggttctgcttcagagtctaggcctttgttggcccatggtcagtgcctagcgatcattttcaggttaaggagtgatcataccaccattgcccgattacctcagggaactcactggactttatttgttcagtgattcacaccactcaataaatacctattgaatgcagggaccttgcatgtggagccaccaccttcagcctccttccgaatgcgtcagagctgggaaagctgcctgtcccgaggatctaatgaagttggggtggtgatcgagtgagggaaaatgcacctgcctcccaaggccaccatgtggatctgaaaaggtgacacagggctcaccaaaaggggtaggggggaccataagctcatgcaaacccctgtgtttgaacaggcccagccccaaaccatcactgatggaacgagctcaaccatgctcatttgctggctctcccttcaggatataaagcgagacccacatccttagagccctcactgaaccacataaggcatccatccacccgacaggtcctgggagacaggtctgtggatggacatctcagggggcagggaggaagtgggggaagagacagagccagtgaaaggaaatggcgctgggacagctaatgggataggacagacctataaggacagacaaggctcggtatgaggaggaccttggttctagcgccagcatggttgctgacaggctgagcaaatgatgtgggcctcagaattctcatctgtgagagggacaccactggggctgctgtgagagcgaggtgggtgtaagggacatcatggtcattattattattagatcaagaggtgttgagcccaagggaaaaatgatgagtgaaatatatttagaaggaggaatagacatccatctgaggaggccttacacccactctgtcttctaacaactcttcacacttgggtttctcaaccatctccatcctgaaatatcttggaaattaaccagcacatgccagagatggaaacttctcccttgccatcatcgatgtccaagtagcccctggtgtggccatctgtccctgctcccctcgttgcaagtcatgcctctacacattatgattatgcaccagggctatgaaaagctctacccagtggggtgctaaggttggggcccttgctttgctgtcacattggtggaggaagaagttctggcttataggccctgcatacaagaagggagtgtatatgaaccagaatggaggtggcctggagtggccactgacggacttgctagaaaaaaaaaaaaaaaacacctggccagcatgctgtctaggacgtataggctaacaacctctacacacacagcatgggtataggtgtgtgcatacacacacactgtggctgagttctttccctactacagccctgacacagacaccttccattttccctgcaaagactagcagagggaagtgagcgcaaccaagacccccaaagatgacactgcaacctgccacagagttcaccagcacatgccagcacagcctcagggaaatgggggtctggacctctccaacggcaaggatgggcctctgtccagcattacccataaatcaggaagtagatgtggaatcgcattatcagcaactggagatgctgcctatggccctgatcggctttactcctggcctgcctgtcaccccctgacatgggacgctttgttactacagaaggtccagggaagcttttcatgggctgatagactgtggggagaggggatcttttcttgttttgttttcttgaacccagcttcaaggctgctgtgcaagcatgccgtcaaactcagccatacgcccgcgacctctgtgcactcacacatctctcatcactctacccagaccctgcttcacaaacccaccctccctcttacccaggacacgcagagaccccgagcaataacaataataatatctccatgcagaaatggtactttcacatatgtgactttttttgatgtgcacccttgtgtgcacacactatgttcagacctagtacccatacacagagccttcactccaaacacgctgcacatacaaagtgtcacgtgtccactgctgaagccagactcggcacatgggcctgcacacgcgtggacggcttccacgcacagagccaaagagggcctcctgaatgcacacatagcgagtgatacataaacatcaggacgagggagagatcagtacaaatatgcactgactcccttctgcacatatgtcacccatgatggggacccccagtacccaaccccccactgaaaacacatgtcacgattctacacctttggctcctcactctgccaaggcttcgaggcccagcacacacagttagtccttcctgaacacatctcaccacacatgcaggccttatacacatgcatgctgccgtcatggtctgactctgtacccaccagccccccactgcacactgactctgtacccaccagccccccactgcacactgactctgtaccttccccttatatcctggggggtggaaggacaaatccacctgacaagatggcaagagactaaaagctactgagcgaagcggctgattgggtctttctctaaatccaggacctactccccaactccacaggccccaggaaggaggcagaaagtggggagtggtcatcaggccaaaggctttctctcaggatcttttacctggactcaaaagctctaaggactctctcagatggacttccgccccaatttcctcccgttttcacttcccgctaggcatccatgtcattttcttctctgtccacacccttctcagtggggctgagtcgacagccatgagccctcacttaagatcttcccctccccctcccagagccccagtgagcatccagcaggacttctccaggaggccacaaggaagtagggggtggcactagaacccaggggacagacccaaacccccactcagggtaaaaaagagggtagaaatacatggggtttcagaacaggggttaggctctggtaggaagttggggattcctgcctttgcatggagcccctttccctggcaccctgttgaaggccagagcagcaagagtgatgaataaatgaaactgagggagggggtagaaagagctggcaacaggggaaatgagtggcaggaagggaagaataaaagaaagggggaaagggggaagggaaaaacggagaaaaaagaagggaaggaggtggagataagggaggtagaaaaagaaaaactaaggggtggggaggaggagaaagagcttttattgagaaaaggaagagatagaaactgaaaaacagtgagaaagaaaaaacagtaaaggagatggaaataaaggagctgagaaaggacatgaaaagggaaagaaaagagaccaaagaggcagcaggcagtcgaaggggttccccaagttacagactttgtccagagagctgaggggtgcaccgcggctccccaacctcactctggggccctggagctccgttttccacctctcctcctgcctgagatgccaccgcctctgagtgccccatcccggctgctttttcctatttctcaccgtttctgctctccaaggcaccccgttcctttctctcacccctcattcccaccacccagccctttctcgttccctgtgccctcttacctctccccccccattgcaccctgcttgcttcggagcttcagacagcatcaccgaccaatatcctcaccatcatcgtactaaaccggcccccacacctccaggaaaagagagagagagagaaaaaaaaaaaaacaggcggaaccgccaccagccctgaccccctctcgcctcattttctccacagtcgccccttcctcaaatgcagggtcaaaatgggggtcccgcccagcccggggagcctctccgaagcgccgcagccagccgggagcagatgccacctcgcctctcttctctgtcctcgctcctttttgtgttcagtggccctggttgcgatgtgttttattttcatcgtctttttattggtattgttttttttctctttttcttttctttattttttggcccgggggcagcagcggcgaagcgcccactgcctgcctctttcctcagctctgcggccgtcaggctctttctctagtctgcgctcttgactccctcctttctcttctgcctcggctctcgctcctccgctcctccgctcctccgtcctttcagctccgtcctcagccgactgccctctcctctctctactgcttccccctccacgcctctcctttcctcatccttcttgccccttctccctttttcctctccctcttcacctcctctccgtccccatttctttccatccctgccccccgcccccacgtacacctctcctttggttccctcactgccatcgagagcaagctgaccccccccatccccaaataataaaaatacccagccagggggcaaagccccggcgccgggcgccgagagggaggcgagagggccggggccgcggcggcggctgacagccggagcgcggtgcggagtgagcggcgcccgcccggctcccgcccggctcccgcccggagagctctctgcaataggccgagccggctgcattaagcttcttgcaatcaataaagcgcgggtcagattatgcaaagcgcagatattaatatgcaaagttttaaagatttttaaatggaagggcaagcgcggcgcgggcgggcgggcgggcaggggctgcgaggggagagggaggaagggagggcaggcgggcgggcgcgcaggcgagctggggagaggaggaggctgcccgccgcccgcccgcccggctgcgccgcgccgccttgccttaccgctgctcccatcggtaggcgccgctgtcttcgccatgcgcgtcagctgcacggctccgaggggatggccgaggaggagccgccgccgccaacgctacccccgctcccgctcccgctcccgcgcccgctcgctgcctgctgctggcgctgctctggccgctgctcctcgcctgagctgccggcgcgagcccaggcgcgcgccatccccggctcccaccttgtccccatggcaaccccgggcccaaggatgctcagagagagagcgcgagcgagagagcgaggggggagagagggagagggagagggcggggagcgcaggggacacggaggcagggagaggcccgagacccacagagacacagagagacacagagacggagagatgcagacatatgcagaaacagagacacagagatagaggagaggggtaggaatagaaggggacacggagacaaggacaatccttgagaccgacagaggcccacagagatactgagagacacagagacacacggacacacagagacacagagacacacggacacacagtaagagacagaggggtaagggcgaggggcagggagcagagagggattcaaaggtatggagagacactgaggtccagagactaacagagatactcagagacacagagacacccagagatagagacagagaaaaaagagagaggggacaggacagggagcacagaagatgcagaggcagagaaagactcctagaggcagagagatgctcagagacacagagacacacagaaacaaatagacacggggacacacagaaaagagacagagaagggtggggagcacaggggactcaaaggcagggagaggccctaaaagccagagactcaaagagacacccagagacaaagaggaaaaggagaagggagagggcaggaagtataggggacatggaggcagagagatgtccagagacacacagaaatatagagacacaggaacagagtggggggagaggagggaggagggagcagatggggacataaaggggcaccaagaaccacagagacactcagagacaaagagataaggagaagaggtccatgcagagacagagatgcagagtcagaaagatagccacagagaagtagacacacagagacagagagatagtgaaaaaatatatatggggagagaaagagactaattcacaaagacagagacacagaaataagagagatagatatgcacaaatcagagataggagaaagctacacgcaaagagagacaaatgaagatgtaaggcagtgttgcagagatacagagataggaagacatagagacagaggcagacacacacagaggtaagagatatagacctgcggaaacagacagagattaagaaagagccgttgaaagagccgttgaaagagacagagaaacagagatggagagatgcaaagccagaaagacagacattgacagagaccaaaagatacagagactgagactgagacagagaaaaaggcacagagagagtcaaacaaggagacagagtcaaacaagaaggtgtagacagaaacacagagaaatatacatagggattctgagagagaacctaagaaacagagacagaaagaaatgtgcaaagagagaaacagagatcaagacataaaaagagatgaaaagaaatacagagatggtgagagaaagaaagcaaagacagagacccagagagtcaaagtgaggcagagaaatgcagagacatggacagagactgcaagaaagtgacaggaacagagaaacctcaggagacacacagagagacacagtgagatggagaaaggcactggaagaggctttcagttggacagagatccacagagagatgcgagacagagacaagaagagacaaatggagagtcagaaatagagaatgaggtctggtagacaaggctggggatggggggcagagacagagcccaggtaaaggaggaagggacaggctggggtgaaagcagaaagtaggaaggtgacaagagggtccagggaagcaccaagggggaaagggcagacaggaggggagggaagaacagcagaaaggagaggagtggggaagggagaggaggggaagaaagagaggagggcagtgcccagtcaccaagcacctcccctgtgccaggcacattatggcttggagacagggaggaaggaaaggaaggccaagggtgaaggggctccgaccaggggaaggtgggcacagggtcttgggagggtgcatggctcccgccccctgcaggcgggggtgcagtggtgcaaagaggaggatagggttgcaagtggtacccagacctgggagggggtgtgagagggagggaacaggagggggaaggcagggagggaaagggaggaggaggaggaggacgcaggcacgcgctgcgcggtcttggcttagcagctgcaaccgcccttcgctttgttaccagcaaggctaccccatgcatactgagtggacacgcgggaccctcatgtgtgtgtgagaaacacgagaatcaccaactgcccacgtgtatggagaacgctcccaagacctacactggaagtgcgtaacataaataaatataggaaacacctaccccgtgggcgtacaaagtaagtacccaggacctgtgcagcgtgtgcataatagacacagaactacctactactccctgtacggagcagcctcctgggacccgcactgtgtgcgcaacacaaataaatgcaaggaatactaccctctgtccatacaaagtaggtatttgggtcttatgcagcagatgcataatggacatgggaccacttaatacccccatacagagcagactcctgggatccacacagtgtgttcacaacacaaataaatacaggaaacgcccactccaactgcacacaaactaggcacatgggcctacagggcatgaacatagtggacacggaaccaccccatagccacctaccaaccagcctccctgggacccatactgtgtgggcacaacataaatgaatgcaggaagtaccctatcccccatgcctacaaagctggcacaccaacctaatagacttagctagtgtgaacataagagacacccatgagcaggttctggtgatccacaaaggcacataacaaaactgaacataagaaacacccactccgcttgcatacaaaggcacatggggtcccaatagtgaggagagaactcaaaaaagggtgtatataatgacaacccacacactatccattctggaaggagcaacaaggaatactggaccctgcaatgaatctacccagcagactcccaggtccctccatctgtacgtgtacaatagacctaggaggagctatggacagcctgagtacctactagaagggaagcagggacagggcagagaccaaggatgtcctgttccctgccttggccctggcacctacaaggaccagtacatgggtggggtggggggcggtcatccttcctaagaatgaccaagtacataataattgtgtatacagtgagtatacactaagcacacagcaccaatgtttgtctgtttgtttgtttgtttgttttgagacagggtctccctctgtcacccaggctggagtgccgcagcgtgatcatggctcactgtagcctcaaactcctgggctcaagcaatcccctcttgcctcagcctcccaagtagctgggactacaggcatgcaccaccacacccatctattttttttttttttaagcagagatgaggtctccatatgttccccaggctaaagcaccaattttaaggatccaaaaaacttggtttgatatgtgctaagtccatatcatatgcttacttgccagtatgttaagagtctgtggtccacaacctatgcatgattggtatcttaattatccagaatatccatattaagcagaagctgacatccctcatggacttacaaaagtcagatccaataggagacttaagcaatccgcacatgcaggttgtcctaactgatttctagggctccgcccagccccgagtcatgattccacgaaggctgatgcagcacatgtatacacaccaggcacatgcaaagacgtacaccatacactgtacacaacacagcaaaaacatgtgtgctctctctgcttctgaaatagcataattccagaagtaccagattcctctgaggaatgtgtgtgtgtgcatgtctgagtgagggccatctctgggtacaggtgtgcatgtacatggctcttcctgtacgaatgagctcagctcttattccctcctcattctgcctgttcatctttcagaaacatgtatacaaataatagtacctgatgtatactaagtacaaaacattgcaagctatggatgaccttaattgagtgtgtgcgtctgaacatacatttatttatttatttatttatttatttatttagagacagagccttgctttgtcactcaggctggactgcagtggcacaatctcggctctctgcaacctctgcctcccgggttcaagctattctcctgcctcagcctcccgagtagctgggattacaggcgcatgccaccatgcccagctaatttttgtattttttagtagagacggggtttcaccatgttggtcaagctggactcaaactcctgacctggtggtccacccacctcggcctcccaaagtgctgggattacaggcgtgagccaacactcccggccttgaacatacctttagatagatgcatttgttcattaatgaaacatttgttcgcgcatctgtggccatgtgtgtgcgtgtgtgtacatcttggtgtcttggttacaagtcttggggctcccttataatctctgaggataaagggtgtaagataagggaaacgaaggcacacaaagcaggaagggaagaaactggggagaaggaaaaaagtggtgcaaggacaaggagcaaaaagaagagacctgttattcaggaggctgaggcacaagaatcacttgaactcaggaggcagaggttgcagtaagccaagattgttccactgcactgccctgggcgatagagcaagactctgtctcaaaagagagagagagagagagagagagagagagagagagagacctggaactggaactggatgtatggaaggaagggaggaggccctgaggacacaggcagagggagatgtggtgcgggagcaaggaagagaacaaggacaggaggagaatgggtgtgagagaaaagaggaagctaggaggaggaagggaggtgaatggtgagcagagcagagtgagggtatcaggaagagtgaaggggactggggagaggagaaaggagatgggagaaggagataaagaccgaagggaaagaaataagaaacagacagaggcttttctggtctgaatgaaatttagaggttgccccagtggcctcctatgggaaggtgttcgagtcggaggatgaaggtgaagcaaaagagagaaaggaagaggaatcacaacctagctccctaggatggggcagccagctgtctccatcatcctagaaggggcccagagacagggacccggaggcacagacagagaggtatgcagagctggactgagatgtggagtcatctgaagtgggtagggtcctgggacaggcaggaggaggagtggagagacttgcaggctcagggaggccagggctcagtggtgtggagacttccaaagaccaggaggaggctggagcaggcaatggagcagggccctgagaccacaagcggggaatcgaagaccaggtaaagggaagcaggttagagaagggcagagaagtgagggcctgctgagcagaaccagccaaagtaaatggaggagcagctggagtgggatgaaaaggccatgaggcatcttgcagatgggtcctgccttatgcacacccgggttcagaagctctcccaggctgactctccccaagcattcagtttggttccatttaagacatgcatactgaatactatcacgaattagcactatgctgtaagctgaagaaacaaatgcaaatgagacacaactctgccctcatagagaccctcatctgaagttgttggtgggggagggaatgaacaataaatacacagttactgatacacacagcaacacagaagtacctcaaaaccaaagtgagagatgcagaagaccacacactgtaggattccatttacatgaaattctagacagcaaaactactgtgacggaaaagcaaatgagtggttgaaaagggctgcagtggaaggaggggactgacagcaaaggcgccggagggaactttttagggtaatggaaatgttttgtaacatgattgtggtggtggttacacaactgtgtgtgtgtgtaaactcattaaactgtacatttacaactggtgaattttattgcatgcaaattatatcacaataaagctgattgcaaataaataaataaataattaccagccagaatattcaagactcaagatagggctctatgggagccaagaggaggtggatggggcagtgacggaaggcttctgagaagaggtgatgcctgagataagacctgaaggataaacaggaggcaggatggagaaagcgttcccatggaagaagagctttcacatggaagcaggtgagaactgaaaaaagttcactatgttttgaacacagaatggagagtaagactatcaagaagtgagtgcaaagaaaatcagggttcaaaatacaaatccattgctattcgaagtaccatgttgaataaaacccacctgcacctgaaaaggcccagagagaaggaaactatgagacacgactggggattttttttttttttttttttttgagacagggtctctctcctccctctgtcatccaggctggagtgcagtggcacaatcacaactcactgccacctcgaccttctcctgcctcaacctcctgagtagctgggacgacaggcgtgcaccaccacaacctgctaatttttgtattttgtggtagagacaggtttttgccatgttgcacagcctggtcttgaactcctcggcttaagcgatctactggccttgatctcccaaagtgccaagattacaggcatgagccaccgctctgggccaagactggggatttctaattggcctcctgtctgccccacagaaaggtctccttcctgccgcccttcccagaacttcctccctgctcttttcacatggggatgtctctctccattaggaagcagcctctgctctggacctatcccccaaccctgcccacatctccaagagtttgtgggccccagtgaatccctccaacctggattccatgtggccactgccccctggtggctgaagtgatgcatgactaaggacgaagggacacctccaagtccaggcccagcatgcccttccagaggccagtccaaggcactcccactactgccccccaagacacacccttgtccctgacagtctcctccttgctaaatcctacaagcacttttcagtcctatctgactctcctctgcagcatgcagccacaaatatcttttcaaaatcctcttggcatctaagaaacctcactctcttggttctccagctctgtctgggctgctctcccagggtgaatcatcccctcccacaactgctttctctatgctggtaatccctaaatttgtctccagtttagccctctctcctaagcttcacatcaggatacccagccacctcctagaggttccaaaaatacctcaaaatcaacatgtctaatctaatcatgtcatcttctctaccatgcccctagaccttggttcccactccccatggtgatactccatccaatctagcattcaagtcagaaaaattgtccctgtccttgacaccttcctcttcctcatattcacatccaatcaggattgaaatcccatccagttcatttacttcattaatattaaaattttaaaccatatgaaattgacaatatcacccagctttttcttacaaaatgggaatttcatagagttcaaccgagtatttctcaaatccatctcctcctctcttccctgctcccagtgtcctagttcaggcctccacatctcctgcttggcccatgaatctccttactacctggcctcccagtctcccctcttgccccctttctagtctatcctccacactggctactggggtaatgtttctacaatatggctctgatcaaatcactcccctgcttcaaactcttacttcctgttgcacacaggacaaaagccaaactccttagtcagcttttcagacccttcacagtaactggctcccctccctctacagggagcaccactatgcatcctgtactgcaaccacaccaaaccaccaccacttccttgaatctgcccttaacctcttggcctttgtacttgcagttccctataactggaatgcccttctcactcttgtccccctggctaacttctatttgactccaagaaccaacttaaaatcatatgttaatgtaaacctccagttcatccattcatccatccaatacacacagcttgagtatctatacttgtatgacctccatagaaggtaccggggacacaaaggggaataggacacaattcctgccatcaagaaagctcacggtccagtaagagacacaaatgcatatataaatcacaacactatagtgtgctaggacacaaaactagactgggaaaattgaattttacttatttttgagatgccgtttcactctgttgcccaggttggagtgcagtggcactattatggctcactgcacactcgaactcctgggctcatgttatcctcctgcctcggccgccccagtagctgggactataggtgcgcacaactacacccggcattttcttgaattttaaaggggactgggacgccgaggcgggtggatcatgaggtcaggagattgagaccatcctggctaacacagtgaaaccccatctctactgaaaatacaaaaaaaaaaattagccgggtgtggtggcgggcgtctgtagtcccagctacttgggaggctgaagcaggagaatggtgtgaacccgggaggcagagcttgcagtgagccgagattgcgccacggcactccagccaggctaccctggctggacagagcgagactccatctcaaacaaaaacaaaaacaaaaaaagaattttaaaggggaaatagtccttctgaaggagtcattaaaattggagggaagcatgaacaagagcacacaggtgaggaagagtaggttgtgtgcagggaggcagttgggattgctaaagcataaaccataagagaaaaatgctgctggagaggctagatggggcccaatcattaagtatcttttgatctaggaggccatggggagccgctgatgggttttcatcaagagcagctttgcatttttgagaatatgaatctgagaggacaagaatgaaagcaggaaaaaccaggaagctattgcaatagcctaggcaagagatgctaatggccagtattgacattggtatcagggacatgaaggaggcaacaggtttaaaaaacccggaggtaactcaagtcagcagggctttatgtttggatatgagcgtcagggagagggtggtgccaaggatgatgcccacgtttctcacttggatgcccggatggatggaggtgacattcattgagacaggagaaaataggaggaggcacagaacttattcgacaaagttctttcttgaacctcttatatctgaggtgcctatgagacatgtcctggatccagcaaagagttatattagttcttcagtctatattgggatacagttgtgtgcagtgtcatagagagaggtctctgggctgaagatctggacatcattagcatagagttgatagctgaaatcacgagtcgatgatgtccctcaagaagaatacgccgaatgtgaagagctctaagcccagaaaagagcccaggagaagtgccacatttcaaaggtgggcagaggtcaggtgcagtggttcacgcctgtaatcccagcattttgggaggccgaggcgggcggatcacctgaggtcaggagttcaacaccagcctggccaacatggcgaaaccccgtctctactaaaaatacaaaaaattagtcgggcgtggtggagggtgcctgtaatcccagttactcaggaggctgaagccgaaacaggagaatcacttgaacccaggaggtggaggctacagtgagctgagattgtgcactccagcctaggtgagactctgtctcaaaaaaaaaaaaaaaaaaaaacaggccaggtgaggtggctcaagcttgtaatcctagcacttcgggaggccaaggcaggcagatcacctgagatcaggagtttgagatcagcctggcaaacatggtgaaaccccatctctactaaaactacaaaaattagctgggcatggtggtgggcgcctgtaatccaagctacttgggaggctgaggtagggagaatagcttgaacccagaggtggaggttgcagtgagccgagatcatgccactgcattccggtctgaccgacagagcgagactccatcacaaaaaaaaaaaaaaaaaaacaggtgggcagagaaatgaagtccctaaatggaccacagaagaagctgtcagggagaagagaagagaaccatgagcctgcttcattatggaggctgtggtaggccacccctaagaggtcccagtgacccctgcctcctgatactcatgtcctcgtgtggtgccctctgcttgaacgtgggctgaaccttttgacttttttaaatcattctatatttcatttcaaaagtgactcacttctcatgaatagaatgtggcaaaagtgatgggatattacttctgagattaggttataaaagactatggcctggtgcagtggctcatgcctataatcccggcactttcggagaccaaggcaggcagatcgcttgagctcaggagttcgagaccagcctgggcaacatagtgaaaccccgtctctaccaaaaatacaaaaaattagccaggcgtggtggtgcgtgcctgtggtcccagatactcaggaggctgaggtgggaggatcacctaagtctgggaggcagaggttgcagtgagctgaaacggtgccactgcactgcaacctgggtgacagagtgagaccttgtctccaaaaaaaaaaaaagaaaaaaagggccgggtgcagaggctcacgcctgtaatcccaacactttgggaggccgaggtgggtggatcacctgaggtcaggagtttgagaccagtatggccaacatggtgaaatcccatctctactaaaaatacaaaaattagccgggcgtggtggcagatgcctgtaatcccagctactcgggaggctgaggcaggagaattgcttgaacccaggaggcggaggttgcagtgagccgagattgcgccattgcactccagcctgggggacgagagagagttcatctcaaaaaaaaaaaaaaaaagaaagaaagtgaaagaaagacagagagagggagggaggaagggaagaaggaaagaagggagggaaggaggaaggaaggaagggagggagggagggaaggaaagggagagggaaagaaagagaaagaaagaaaaagagagaggaagaaaaaagaaagaaagggaaagagagagaaagaaagaaagaaagggagagaggaaggaagggaggaagagaagagaggaaggaaggaaggaaggaaggaaggaaggaaggaaggaaggaagggagttttgggttgatttaatatacagaagccaaggaaggaaagatttctaaaagagaggtactggtcgatggagttaaagctttagataaagatgaaaaatgtacttggatttggcaagagaaagtccttaacaagctcaatgtgagtggtttcagtgagttgtgactcaaatgcaaggtgaaggccggggctggtaagcaggaatggataccaatgtttctgcccacccagcatccatttcgccatcctctgtaatggctccctgacttttcactgagtaaccattacccacgtcctactggatatgcttccatgagactgttagggcactcagctgtccacaggccaaggggagtcatgggaggccacaagactcaagctgcaccagtcagaagctctccctggaatttgaatcatgagcttatgtgacaggaggcccaaatctgattgcagctgatttatgttgtacccagggccctgaggaagctgccattccttcctgctacttcaatccctgctactgccctggttctagtcttttctgaaggctgcttcttcagtctctccctctgttgtgagtgccatcttaatctccttctaataaatatctttcttgcttaagttagcaagagtcggtctctgttgctgcagccaaagaaccctaactcatacttgtcctttcaagaatttgggatgagatgaggaggacaatgaaggacaagcacgaggggagcatagcctggaggaaggtagaggtttttttgagtgcggcggggggagtttgttttgtttctttgtttttgagatactctgtcacctaggctggagtgcagtggtgggatcatggtagcctcaatctcccaggctccagcaatcctcctccctcagccccctgagtagctgggaccacaacaagtgcacaccaccatacttggctaatttttttttatttttagcagagacagggtctcactatgttgcccattctggtcttgaactcttggttcaagcaatcctcccgcctcagcctcccaaagtgctgggattacaggcgtaagccgctgcacctggtgagtttttttcttttagttagtttctaaggtggtagaaacatggatgtatctataggttaagaaggaagacagagaagagggaaggtgtggaaacagggaagggaagaaagatggagtaagagtcatgctgggagtcatgctgggatgagcaatacacaggtggagaggaggacaagaacagagcttgaagaagtgaaataaatatgggtgtggctacatgaagggttgtttcatttgtttaaaaaaatctttatatatatatgtgtgtatatatatgtataaaaacctatatatatatatatgtttgataacaagttgaaggaaatcatggtccatttgcctcaattttatttgttgagactgaaagggtagggttgtagggatgctcaagggagaagggtaagtgagagagggggctggctaagaagtttgagtgacacctatatgtgctactctgccaccatttttccctgagccaagttctaccacctggaccacagttagggatatgctggcaaatgaggcagaaggctgggggtataaggggctgggcacgatggctcacacctgtaatcccagcactctgtgaggccgaggcaggctgatcacttgaggtcaggaattcgagaccagcctggccaagatggtgaaagcctgtctctattaaaaatacaaaaattataaagattattagtatgaatgctgttactgagataaatgagcctatggatgagataatatttcatgcggtatatgtatcaggatagtcggagtaacgtcgaggcatacctggtaggccaaggaagttctgtgggataaaggttaaattaacacctatagatgtaacggtaaagtggattttagcataggtctggttaagtgtgtaacctgaaaaaatggggaatcagtggacacctgtgatcccagctacttgggaggctgaggcacaagaatcacgtgaacccaagaggtggaggttgtggtgagctgagatcgcgccattgcactccacactccaacctgggtgacagagcgagactcagtttcaaaaaaaaaaaaaaaaaaggctagggttgtaggattgtaagggaattgagagcatatgctggtcattttccatttgccctccaggtccaccctccattcttctctacccatatgggtggcatcatcggacccccccttgctctctgacttcaaattaggttcctccctaaaagaagcaccagcagggcatcagagaacagaaaaagaaagcattctggatacttcttctccaactcccagctctgtgtcagcaccttggttctgacagtggctgtgcccctccacaactccagctcctctcaggcatgttccatgactctcacagcactccagtaataccaatcctttcctcactccttcagacctaagggtggtcacagcttcctgctgccttcacctcccttgttggttacctcaaccctgcccacacctctgcaaagagtcccttcattaaattatcttcaaaatcccagctgtggtgccttctgtttcctgctgggaccttgactattagagagctagtgaaagagctcagatggtccaatatgagactctggctgggcaaggaagggagagaagccaggaggggtctggcagactggcagaaaacagagggatcaagggagtagagctctctttgagttgacgccacaggtgtgatggcagtgaggggctgtcagatctgaaaggcaggtgctgggatcagagagcaggatgctggattttgaactgggttgtggttaaaatcagggattttttatttggaactcagaaagtcatgtgttagaattccgactctgccattttactaaatgtgtcacccaggcaagtgactttaccttcctgagtgtatatcctcatctgtaaaatgaggatactaacaccagccttccaggtttgtgtcaggcgtaaacacatgtaaagcatttggcaaagtgcctggcatgtggtataagtgctctgtaaatgttcactatgtatgttacacttcctggtaatgactaaacccaaggtgtggtcatgggagtggatgactaaagtgggatgaaggtcaccagagatgaagtggaaagagactgtgaggctagatcattacgaggatggattatcagggacagttaaatatcccagcaggagagcatgggttggggtggagaggaagtctatgagcaggtgctagtcttcaggaacgaggtgaagtgaccagggagtcaacggatgtcaacagggaagtgggatagagggtggtggaacctgaggacataagcctcaaggaaatctgggtcctcagtccctcttacatccctttgagatgtccccagtgatcatgttccctactaagccagagtttatcaagggtggggttggatctaactcatcttgtagtacctaggacaggtgtttaagctggtaaatgcttgttgaatgacttggtgtttgagggaaacagaaaagtctacctctgcatcgtatttacccttggtaataataattcttcttattttaagtaacctaatgcttcttttaaacctcttattcaatttaaacaaatatttcctgagaccttcatacatgctattccatctacctggaataccctcacccactctatacactcaaagacctcctactcctcattcaagaaagagcagaatttaattattaggaagaagaaaagtaaaccacaatgataaactgctacacatccatcagatcagcaaaattaaagcatctgacaacacatagtattggtgacaatgtgaagcaaagagagctctcattcagtgctggtgggagagtaaactggtactgacacttcagaaaaatagttggagagtgtagtgtgcagaaaaatttcctgcaaaagccaggcgcggtggctcacgcctgtaatcccagcactttgggaggctgaggcgggcggatcacgaagtcaggagatcaagactatcctggctaacacggtgaaatcccgtctctactaaaaatacaaaaaaaaaaaaatagccgggcgtggtggtgggcgactgtagtcccagctactagggaggctgaggcgggagaatggcgggaggcggagcttgcagtgagccaagatcgggccactgcactgcaacctgggcgacagaacgagactccgtctcaaaaaaaaaaaaaaaaaaagaggaaagaaaaatttcctgcgaaagatgtccagactgaagctctggaacctgtgaatgttaccttaaatggcaaaaaggactttgcagatgtaattaaagattgtgaaatgaagagattatcctggattatttgggtgggcccttaaagcaatcacatatacccttctaagagggaggcagaggaagatttgacacagacagaagaggagaaggcaccacagaagcagagattggagtgatgctgccacaagccaagggatggtggtggctaccagaagctgagataggcaaggaacacattctcccctaagcctcaggagggagtgcagtcctgctggcaccttaatttcagtctagtggaactggttttagatttctggcttcctgaactgtgagaaaatacatttatattgtgttaagccagcacgtttatggtaatttgttatagcagttacaagaaacagtatagacagccaaacccatgcatacgcatacctatgtccagcaattctatttccaggtatatccctatagaaacataagcatttgttcaccaaaaaccatgcacaagaatgttcatagcagcattattcataatagcctccaactggaaacaacccaaatgtccatcaaaaggtcagtgcatgaactcattgtgtatattcatacaatggagtaccatgatacgccaataaaaatgagtcaactacagataagcagaatatagaagaatctcacaaacacaacgctgggtaaaggaaaccagacacaacagcaaacatatggtatgattccatttatattatgttcaagaagagataaaattaactctatcactgagtgatgaaaaactagaaaattgaagaaaagcaaggcggtggctcatgcctgtaatcccagcactttaggaggctgaggcggatcgcttgagcccaggagttcaagaccagcctgggcaacatagtgagaccccgtctctacaaaaaaaataataataataagccaggtgtggtggtgcatgcctgtagtcccagctactcaagaggctgaggtggattgcttgagcccaggagtttgaggttacaatgagttgtgatcgtgccactgcactccattctgggtaacagagcaagaccctgttgaaagaagcaaaagaaaaagagaaagaggaagaaagaaatgaaggaagaaagtgagggagagaggaaggaaggaagggaggaagaaagaaaggaagagatcgggtgccgtggctcatgcctgtaatcccagcactttgggaggccgaggctggcggatcacctgagatcaggagttcgagaccagcctggccaacatggtgaaaccccacctctactaaaaatataaaaattagccgagtatggtggcacatgcctgtaatcccaactgccagggaggctgaagcagaaggatctcttgaacctgggaggtggaggttacagtgagccgaaatcacgccactgaagtccagcctgggcaacagagtgagactctgtctcaaaaaaaaaaaaaaaaaaaaaaaaaaaagacaggaaggggagggagggaggaagaaggaagaaaggcagaaagggagaaagggaggaagggagggagggaaggtggaaagaaggaaaaaaggaaggaaggaagaaagggagggagggaaggaggaaggaagggaaggaggaaagaaagtgagggaaggaagggaaggaaatgaaggaggggggagggagggagaaagagagggagggaggaagggagggagagagggagggagggaggaacgaagggagggagggaggaaggaagggagggagggagggaggaaggaagggagggaggaagggaggaaggaagggagggagggagggaggaacgaagagagggaggaacgaagggagggagggagggaaagaagggagggggaatggagggagggatgagagcatgacagaaaggtgggcaggtggctccctgatatcccccagcgtccctgctgttaacgttatttcttggcaagagtaacacaggaaaggagggaggtttcctccttcatttccttcccttccttccctccctctttttcttttttttttttttttttttgagacggagtctcattctgtcgcccaggctggagtgcagtggcgcaatctcggctcacggcaagctccgcctcccgggttcacgccattctcctgcctcagcctccccagtacctggaactacaggcgcccgccaccacaccaggctaattttttgtatttttagtagagaaggggtttcccagtattacctaggatggtcttgatctcctgacttcgtgatccacctgcctcagcctctcaaagtgctaggattacaggcatgagccaccgcgcctggccccctccctccctttcttccctccctcccttcctctttccctccctccctttcttccttccttcgttccttttttccttccttccaccaccttccctccctccctcccttcctccctttctgcctttcttcctccctccctccccttcctgtcttttttttttttctgagacagagtctcattctgttgcccaggctggacttcagtggcgtgatttcggctcactgcaacctccacctcccaggttcaagagatccttctgcttcagcctccctggcagttgggattacaggcatgtgccaccatactcggctaatttttatatttttagtagagacggggtttcaccatgttggccaggctggtctcgaactcctgacctcaggtaatatgaacagttcgtttctgtcctgcacttttcagaatgttatttcacaactaaacgtatctgggcggtggcggtggtgattcgtagcagaaagcacagggagcttcccggtgcccccagcgtcccctgggctccgacccgctgtgtccacatcatcacaggtgccctccagagccagcacccaggccacagtcccctcaaggacctgtgggccatttgctgggcctgtctcacatgatctccttgtgtgtaactgtcgggttccaggcctgtgtccccacctgtgcctgctccccacgcggaaaaacatggggacaatggctgctgaccctcgaatgggtggtggcggcacgttctcacttacctctgactctgtccgtcttactacatcccattcaggcacgtcccgaggccttcgcaagggctgaaaaattccagcaaaggctgtcccctgcccagaataccccgtcactctgttgaactcctcctcagcccgcacaggccaacccaaggttccgctcctccgtggggccacgccggcctcccacatctcccatgggctccgatctcctgtggccccacgccctgtccccacacgatcctgtttctctacccgatgctcccagggttgtcctccgggctcagatctgacccacctccgggccccgagggtcagtccctcaccccccgcgcctcgcccgcactcttgactagctcaagggagctccacggcgcatgcgctcagggaggctctggaggcgcgagcctctgcctcatggttcccgccaagtgcactgcgccagcgcagatcccttcagcctcaaggttggccctcctgacttctggcaagcacgtgctggccagaggcacgtctggggctgaacagggttaagggggaggtgacccagagaatggggtggggccaatgacatggaacggaagcaggggcagagcctgaaatgtgtccagccttgaggtgggacccgtattcaaatgaggccaggagacaagccaggggctaggggctcaagggaatggcaggtcctagaatttagcccagtaattgggagcccaaacacaggtaaccccacctagaggagagcctcagccttaggtcatgaaaatggaagggtcagggcaagggagtggaattccccacctcattccccacctaactgctgtcactaaggtactctccatctcaatgctcccaccactcaggtaaatcacctgccctctctcagtccatttcacatcaaacatgggtttaaaatcccacagtgtggctgggggctaaatagatcttgagtaggtgtccagtggaactcagcttcctcccagagagggtcaaggcagaacctgggatcacacagcagctggctccaccaggccttggctgctggataggactcacgactagactttgccactcccctcctgcacatcaagacgggtcgaaattccagaacaggctccaaggtgtgggcaggggcacccatccctgcaagaaaggcagccttggaaatccctgccaccctacccccactccccacccctgaggaaggaaaaccctgaatattgagtaagagaaacgagttcctgagcccttacatgaggggtgggggaagggcaggaggccacaacctcagctggagccacagaacagcaggaggaagtgtttggcctcagaaagaacagagatccaggtgaagagaaggttaatgtccaggtgtgaccagtggggagccacgtggagacaaattccaggcagagaacctctggctgcctatcttttcattttccaaagcttaggcgcttcatcagccttgggtgtagctggcccacctcactgaacaaattaaaaatcctgggagtggccgggtgcagcagctcacgcctgtaatcccagcgctttgggaggctgaggcgggcggatcacaaggtcgggagatcgagaccatcctggctaacatggtgaaaccccgtctctactaaaaatacaaaaaattacccgggcgtggtggcgggcacctgtagtcccagctactcgggaggctgaggcaggagaatggcgtgaacctgggaggcggagcttgcagtgagctgagatcatgccactgcactccagcctgggcaacagagcaagactccgtctcaaaaaaaaaaaaaaaaaaaaattcctgggagcccccaaggacatacaggagcaaagcatgtgtgaacatggttggaagggtttctgactccgaggcagtattctatttcttcctttgacagaggacaagactgacacccagaggggaggacaagcgtgtggttatcagctggcatatggtccagcatcctgcccacactccagtccctaacgctgggccaggaacactcctcctcccagcccactgaggtccaaaagctgggcatggtgacgggcacctgtagtcccagctacttgggaggctgaggcaggaggatcgcttgagcccaggaatttgaggctggcctgggcaacatatcaagaccctcaactctaaaaaaaaaatttaaattaaataataaataaagagtcctagagaggccgatgcccacctatgccctttccagggcagtttaattggtatcatttgtaaaaggtcttttccatcacccccaaagcctttgcattccctttccaagaaggtggctgtttactggttttggccccatgtgcaacagtaggccttggtatgatgctgccataacactcccatgtgacactccaggtgacatccaagtgcaagtctatgttcagctctggacagcaggggggaaggtgaggagagtcaggtctgtaaattgaagctgggcagggccctggctggctggagatgtgtgggcaaggtgagcaggccccatgtgcaccccagctccagtgcccactgatgtggctgaagcccaggttggttgtggtcaaattagaggtcctgagagagaagcccttaggccaaagaagtgtgtgctgggaagcaggccagggcagaggcccagggaagatctcagcaggggcagtgtgagcatgagcgagtgtgtgcacctgtgacagtgcagacagcccaagatcagagatacaatgtgcaggggggcctttggtgagtgtgtagctgtgcccctcccttctgagatacaggcccagcccccgcctccggaggctaagggggcacacctgggggtaggaggagtctgggaaggaaactcagctggaaatggtttaggcctcagagcccacatcctgtgggaggggctgtcaaggggcctgctgtcccggtcctgtcgcagtcctcaaagatgctagagtgacagtcctctaggggtagagatggtcgtcctcccaggagaaggtggcccggagacttggaggtgggatcaatcctgccagtcctggatcaggaggcctctgtcgggcgccgccccccttcctcctccatcagcaacaggcggcgccggccagcctcatagtcagcctcatccacactgaccagcaggcgaacagcctcccggcccacagcctctcgcagggcctcagtcaggaacacgccccgcagggcctgcagcagggcgccactcaggtagtcgccccagaaggcgtccagataggagagctctgagaacttgatgtcacaaaccacagagcccaggtcccttgagcgcagcactgcggtggcctgcccaaacacgtccagctgccgcgccagcgcctggggccgccgggatgccacgccctgctccaaggctggcccatgctcgcagtactctgctcgaacccggagccggatgtctgcaggggaaggagggatttgtcagggagggggccaacactagacacacttatggggaacgccacccttcctccctccagccttctccctccacccccttccggtagccacaccctagtcctgacacagcctccccggctctgtggggttccctgaccaagtacgtcctcctcttctccagcccaccacctcctcactgctccaacaagcctccccaccgccaggggtgctctttccctggatctgcacaacacttgctccctctcttcctgcaggtctttgctcaaaagccaccttgccaacaaggcccacctaggccaacctatttacagctgtaaccacccacccagccctctctgcagcatgccaggtcccacaccctgctccatttttgtccaaggcacttatcaccttccaacctcctctgtcagttactatctgctcattatctgtctctacactcagcatggagagacagatgacagcaaggaaggggtttttgtctgttttgttcacttgtgtaactgtggcacatagtaggtgttcaatatgtatttgtgaagaactaatgcatgaactaatggacttgccttaaggcaaccagcctcacaccctgcccccaaacaatgagattcacatggtgccaaccacatccccatccctcccatccacctgagccagcactgcggatgcgcagggtcctgaccaggcccgggaggcttgcggctggacctgtgctggctctactgggagtcaggtactctcttgccacagagctgctaagatgatgggttggaagcccagagctgctgggagccactgtgccaagaggagagaaggaagcctacgcagggccagccccagagataaaaagattcctgaggtcatcacatgagcccacgatcgtagctggattttcagctacactcaactcccctttttgctgaagccagtttgagtcggtttctgtcacaactctccccacatctgcgcaaaagaggtggcagctgtgtacaggggacaggacactggacttctaaggctatcctgtaatcatgaacttcacataccacctctcttccagaatttctgaattcccacccatcacttaggctagtgacagtaccccctctctctacacacccaacgaggctgtcctgaggatcagctgtgagccagaaacagcagcagccaacacttacagagtgccgactatctgccaggcgccaagtgcttgaatcacagaaactcatttaacctataaatgaccctgtgggacaggtcctattatcacccccaacttacagatgaaaaaatggaggccaagagaagtgaagtgacttgcccaaggtcacacggccagacaatggcagtgcctgacagaggtcatttaacctcctatgtccctgagagaaggctcctcaatcaatgaagtggattcccacacaggagccttcagcagtgtgacctgtgacaagtcacaacctctctgagcatgggttcctgcctaaacaaggggacaattcctactgtgaggagctgttaagaggattaaaaagagagcaatggatagaaaggaacaagctagcactgcacacagtgtccaaggggtgctcccagaatggcagccaccaacccctctgataggccaattgcctgacccttggggatgcagtagaatcagccctgtggggcagaggccaccttcagcccacttgacagatgaggaaacaaggctctgggagggaatgtctcatgctgtggctcccttcaactttcacagaccatgtcagccacagagcagaaaggagaatgcagggcccctgctccccaagacaacttcacagccctgcccacttcctccttccaccccaaacccttcctctttctggctctaggggaaccccatcctctccacccaacgcccagggaagcctgcccagcctcagcccccaggccctcccatggcattcagacccagctgtctctacccagacgaccagatccttgactgcatccttgactccagtaagcaactggccatgacctcaatcaatgtgggtgggagagcagggggctgggaggagcagcacctcttccaggccacccaggagtggttggccacagaggcagggccaggtggcggagtccaacagaccttgaggtgagtcccagctctgccactctctaagctgtggggccttgggcatgtgaccttacctctctgagcctgtttccccatctgaaacacaaacaaacaagaggtccctgctgcacattgaagtcacaaggattaaatgaggcaactcataaaatgcttgcttacagccctacgacaaagaaggctcccagaaacaggaactgtaatttcgacacccaactccctacacccatggccctcacccaggccttcatctctctctcacgggtccctaagccaacctcctccttggactcctccagtccctgccgtgtccccccataccctgcactccagtcacaagaaaatgttcccaacaagagccttacttacaaaatgacctgtccacctcctccatccagaacatttgccaaggctcagctcgtgggagccccacatcctgcccagttgaatcctctctcagctcgtccttctccccagcatggacctctggtataagttctcaatccacccagagcccccaccatgtcagagtggacaggtcacagggacaaggccagagcaatctccatgcccccattcaatctcttattcaacagatattttatgaatgccaggcatgctagggtgacacaagaaccttgccacaagtgggacggggagacatgtaacccacagttaggaagcactccccacaagccaggctctactcaagggctttcctctctcagcccacctaatcctcagagtactttcaccagccccatttacagatgagcaaatccttcagcagaccacacactcccacctctgagctggaaaacatgatcatggtgcacagggaaaagacagggaggtgccaccaggcaataggagcaggcgaggcttctctgagcctctgctccacccttagcacccaatcacgtgctttacccctccccaaaataatcacaacaggtgacacctgcctatagcttttactacaggctggcacggtactacatacttcacatctgctgacccctttgattgtccccacaacaatcaggtgatgctgttattattccctttctgcagatggggaaattgaggcacacaggttgagtcacctgcctaaggccaccagataggaaatggcagagctggaattttacctcacgtgtatggctccagtgcccgagctcttaactacccctatcctgttggctacctcacacagaaccatacacatcaaatacacaactaaaagacatcctgagagccagcagagaaaattagacagggcgagttatagttcagattgaaaggatcagagaggatctctctaggaaatgacatctgaagtaaaatgtgaaggaggacaagtaggtttagaaagaaaaacaggagagaaaaaaagaatggcattctcaggagagatgagcatttatggaagtccagagagaaaatgaacttcaggcctgcacaggctgaggggccggcgtggcaggaacgtggaggggagaagggcgctaagggagaacgggcagccaggtcagggaggctgatctcaatcccaatcgccagcagactcaagattctagggcctctggaagtgaccacacctctctgtacctcggtggcctcctgtgtaaaacaaggctccccctaacatccgcccatgtggggttactgtgagaattcaaggctcaatgcaaggaaagaggggaggccaggaaggccaggcatgcagagaggacaggaggcaggacctgccaacttaggggcaactccagctgtgctgtgaagtggcaggtgggtagaaacagggccagggcagcaggcaggggaagggtcacaaatggctgtccaggatgggagcagtagacatggagagaagtggaggaactgtccagtgtggccctgaggtggcaggcaggaagagcacccagcaccatgtgcgctggaccgtgggctggctgcatcttttccattttggcagctgtggggaaaagttccctgtccctgggagggtggggggcaggtgccatgccttcctagagaggagagctgctcctgcttcctgcactcaggtgggcccagcaccctcttgtcccccacccccacctcaccagtctctcttctggggcaaatgggacatcaagtgaaatgggcttctcagtgggggaccagggtgaagttcaagggagcaggccctgggctgggtgtgtctgggagcccagagatgaacctcactcaagtcgtctctctaagagttcctagttgggtggtgataaggtttggatgtatgttctctccaaatctcatgtggaaatgtgactccaacattgtaggtggaacctcatggaaggtgttggatcatggggctgggtccctcatgaatcccttggtgatgagtgagttcttgctctggtatttcccgtgagagctggttaagagtgtggcagctcccccaccccccaactctcaccatgtgacaagcctgctccccttggccttccaccatgaatggaagcttccggaggtcctcaacagaagcagatgctggcaccctgcttcttgtacagcctgcagaaccgtgagccaagtaaatctcttttctttacaaattacacagtctcaggtatttctttatagcaacacaaaaatgaactaacaaagatgggctggggaagaagaggacctgtgctcccacaacactgggagatgcttccggccttgctggagagaggcagccaaggtgcttcagtggagagaccccacccccgccccgcccccacaccaggaccagcaccagccccctctggacaatggtgggaaccctcccagcatcttggcttgcctccctcgtctcttctccacaacaaagccagcatcatcatgtcaaatggaaagtttttcaactcctactgagttcaactcctactgaattgaggcaatgaggagaagctgcctccaactccagagagggataagcagccatcacctgcttcctgatggaggcgcacaacacaccctcagaagcgggattgaggaaaacaaaacatcaaaccagaatctgatcaagcctctccagaccccactacccatcttcaggaaatacaaaagacagggtagaacacactgaatcaaccctactgcaggatacagtcagcaaaatccagtcttcgggaaatgccacaggacaactgctttagaaaaatacaacgcaaggcggagaaagagagatggtaggggaaaggagagacttcagagaacctacatttataaaacaactgaaaatctgagcaccgatcagatatttgatagtaaggagttactaatcttttttggcgtgaaaccctatttttatctttggccagccacagtggctcacacctgtaatcccaacactttgggaggcccaggcgggtggatcacctgaggtcgggagttcgagaccagcctgaccaacatggagaaaccctgtctattaaaaatacaaaattagccgggtgtggtagcacatgcctgtaatcctagctactcgggaggctgaggcaggagaatcgcttcaacccgggaggcagaggttgcggtaggctgagatcacgtcattgcactccagcctgggcaacaacagcaaaactccatctcaaaaaaaaaaatctcttttcaagatacacagtgaaacatctacagatgagatcatagggcaaccagaattgactccaaaattcctaattatcctaagatgagatcagccatgagttgacaatggctaaagctagtctatctactttggtgtattttccatagaaaaaattgcaggggccaggcggtggctcatgcctgtaatcccagcactttgggaggccaaggcaggtgaatcgctttgagctcaggagttcgagaccagcctgggcaacagggcaagatcctgcctctaaaaaaacacacagaaattagccaggcatgctggatcacgcttgtagttccagctactcaggaggctgaggttggagaatcacttgacctgggaagcggaggctgcagtgagctgagactgcgccactgtgctccagcctgggcgacggagaccctgtctcataatttaaaaaaaaaaaaaaaaattgcaggggagaagcaaagctgatcctgtcattcaaatcctccaactgctttccataataaaaaaaaaaaaaatgcaaagcccaggccctgcaggatctgccctggttccctctcccgccctcacctcctaggggtctccaccctactcctccattcctgtcagtttccttgccatcctccacgctgcccttgagcactggcacatcccacttgggcctgtgctcccgctgtcctctccatcgggaacacccttcccctgacatctgaaatctctctcttggctttctcccaccacagcacaagctcaatgagggcaaggtctcccaccccggctgacctagcatatagtaaataccctataaatacatatggaataaacaaataaacaaacccaagtttcagccaagctctgccccctgccactcagactagtgaccgcctttccctgatcgtgcctcttcctttgcaagatgtcatcccacctcaatggctgtcttgagaattcagggccgagtagtgcccaccacagaccctgagaggcacatggtcgctcagatgtcctgtgtccaaccctaggaccaccaaggtgtccttcctcactgtctcaggcagtcgagagtttgtctagttctatccctcaatggagggcagctggctgggggtcacaggtatcacaggtgaggaagagtcaagaatagcaggcctcttcttcagtcaggcctccttccacctctggcattcggcctctctaaaaagtaagccattccatttttcagagggaaaaacaggagcccagatggggagagcctcactccagccccaccctgcctggtgagtcagcagtcagacctgctcacccatctcccatcaagacctagccaagccctggttaacgacctcctcgcctcgggaaagagacctgaagcctcccttggcctgttcctatcttccttgaggcaatgactccctcacctgcccagccagcctggtggctctgggaattactggctgattcgagggggagtcaccaccaggcaaccaccccctcaaaccctgccgcgcaagcccacatagctgcctgaggacccagggctggctctctaggtctgttccttctgacagcacccagcacaggttatctgctgcctcatctacaaagcaggcatgatgcccactccctggagggccattatgggcactaggagggggcaggtgcgcgtgctttgtgggctggagaaagctctgcagatggtagaaggaagcacccccaggccaaggtctcctagaagacaggacatgccagcatctcaccagctccaacttggtcttctgacctccagcttccacaatggcctcctcccctgaacccttccactccccccaggggcctcctcccctccctcagcagcctcagccctttgcaggggctcggcaccacccctggcctcatgtttcattagggcacttgtcactagctgatgccgtctgctacgctggcttattttcgagttatctgtcttgcccactataacgtaaactcctggaggctgaggactttcttcacctggtccaattctgagccctccgtgcctggaacagtgcttggcataaagatgatcctaataaaaactggatgaaggaattaacaaacccttccatggctccctcacccaccaccccctagaataaaatccaaaccaaggccccccacctgcctcatctccccctgctcccacccacaaagcctctgctccagacagactcagccctgaccacatccggctggggacgttgtacgcatgagtcactctgccagaatcacccttcccagctcctcttccagcttccttgagcttgttctagacatggcacctccacaaggaaactggggctggccaggagactccctgcacaccccagagcccctgcactcacaatacccgtgccacctgtcacatcagcctggctgccacttccctcatctgtcttccctgcagcctgagagctcgaagaccatatctgatcccttctgtgtttcccaagcttgcccaactagagaaaggagtactacagttgaggcggtgctcattgctgtgtcctccccacatgaccaagtggaatttctcaagagcaaggtcaaagtagtctcacagcagagtccccaacccacccaacccatcgtgtctacagtcagccctatggccagtgcccttccttatttcctaggtcacttctcctcaccctctccaacacgacccccaggccagacctctgcctagtccttctccacagacctcacagcctcttcaagcgattaatttaatctacgtaacacatgcctagcagagcacctactagaagcccagtgcatcctaaacactttgaaaaccctaacttgcttattaactgattttccagatggagttagagttccctgaagaggaatcacatcacgtcaccctcctgctcaaaacccactgccagtgcctggcgcatggaataaaatccaaactgtcatccctgccgtggcccgcgaggccaagctgctccggccccagcctggctcctccacctgctcccaccctctcttggtggcacttatcattgtctaaaatgatcttcagtttcactggtcacctgactaggtcagctccacaagagccgggaaccttgctgcagcactcctgccccaggcacactgcacagcaacagtgagaacaaaccctcgtacagcgtgtgccgggttgggcactgctccaggcatactgtgggtaaatttgttttctcacaacaatccaaacagggaggtgattatcagcctcactttacagatgtggaaactgaggtggatggctgggtgcggtggctcacgcctgtaatcccagaactttggaaggctgaggcgggtggatcacttgaggtcaggagttcaagaccagcctggccaacatagtgaaacccatctctactaactaaaaatacaaaaattagctgggcgtggcagtgggtgccagtaatcccagctacttgggaggctgaggcaggagaactgcttgaacccaggaggcggaggttgcagtaagccaagatcacaccactgcactccagcctgagagacagagggagatggcgtctcaaaaaaaaaagaaaagaaaagaaacgaaactgaggcagagaggttcaattactggcctgaggtcagacaacttatttaagtgccaagaccaggatgtaaatcaggcagcctgatccaggatcgttgtttttttaccccgtgatatgctgccactgcacaagaaatgtctgaataagtaaaccccggcagatgtttgctgaatacacaaatgaaactagggcagggggttgtcaggaaaggcttcctgaaggaggtggcacaagatctgatccttcaacaatggacaggatgtagacaggcaagatggcgagagaaaggacaagaattccactgtggtgaacgagagctgacacccatctgccaagtgtgtcacatcccccagaaaaatgctcatttctcccaccctctgaacccacccggggcactctacatgcattgccaaagcctacagacacctaccacaggtcactttgccttcagaggaaggtctggcgggctctgactgctgctggggtgcggctggggcccctctccgccgccgtctggcaccaccactgggccggccccgactccgccgctgccgcttggttgggggggagcctgaggggaaaaaaatggggcaagttgaggaccaggatgacagctagagtgcccaggtgtatgcctggaaaagaactcaaggtgttctcggtgctgagaccctgagtgagccagtctgcctcccttcttcagtggccctgtctaaaagatgaagagtaccatctagcatcatctagaagggcaaatgagtacaccccagcacgctgcagcaggctcactccaggtgtgatgtgaccctagagaaatccctgcacacttacaccaggagacacacacgacaaccgccaccagggcattgtttatcatgatgaaaacctgagaacaacatatctggcaagaagaaacaggaatatagggagatgtccaggatagactgtttaaggaaataaagcaagatacaaaataagtgtctacagtgtgctgtactttgcataaggagggaaattaagattatatatatctgcaaaatgaaacactagaagcacagactagaaatgaatgaattgggggtgaggggcacccagcagtagaaatgacatgtctaaaaatacttttcatacttttttttttgagaccgagtttcgctcttgttgctcaggctggagtgcaatggcacaatcttggctcactgcaatctccgcctcccgggttcaagcaattctcctgcctcaggttcccaagtaaccgggattacaggtgtctgccacgacaaccggctaattttttgtattttaagtagagatgggtttcaccatgttggccaggctggtctcaaactcctgacctcaagtgatccacccgcctcggcctcccaaagtgctgggattatgggcattgagtcaccaagcccagccccacactttagttttgacttttgactcatataactgatttacacacttaaaaagttaaaatgaaataaaccataaaattaacacaaataggccgcacacggtgtggctcccgcctacaatcccagcacttttggaaggccgaggtgggtggatcacttgagatcaggagttcgagaccagtttgaccaacatggttgaaaccctgtctctactaaaaatacaaaaatcagctgggcgtggtggcgcctacctgtaatcccagctactggggaagctgaggcaggagaattgcttgaacccaggagctggaggctgcagtgagccgagattgtgccactgcactccagccagggtgacagtgtgagaccctgtctcaaaaaaaaaaaaaaaaaaaaattaaacacaaacagaagaaaatgaacctggtcggatgttgtggttcatgtctgtaatcccagcctacgccctaggagttcaagaccaacctggaacccgggcaacatggaaaaacccgtctctattaaaataaaatgtaaaaaaattagccgggtgtggtagcacgtgcctgtagtcccagctacttgggaggctgaggtgggagggctgcttgagcccaggagatctaggctgcagtaagcagtgtttgcgccactggactccagcctgggaaacagagctagaccctcaaagggagaagggagaagaaaaggaaggaaggaagggagagagggacggagggagggagggagggagggaaggaggaagagagggagggaggaagggagggaggggattgtatacataattggtaacaggaatactcagatgaaacaattattcaagtaacttgaagaacattctgactgtaaaatctcaatgggatatgctcagagaacaagaaacacaaataaaatctatgtttcattcactagatacagtcagcagttgtactgactttgttattttgatgctatttaattactgttgtaaaataaatcaaacaaacccacatcttaatgttattaagaggaaagacttttagtataaaaaagtctggctggggctgggtgcagtggctaacacctataatcccagcattctgggaggccgaggcgggcggatcacctcaagtcgggagttcgagaccagcctgaccaacatggagaaaccctgtctccactaaaaatacaaaattagtcgggcgtggtggcacatgcctgtaatcccagctactcaggaggctgaggcaggagaatcgcttgaacccgggaggcggaggttgcggtgagccgagattgtgccattgcactccagcctgggcaacaagagtgaaactctttctcaataataataataataataataataaattaattaattaaaaagtctggctgggagcagtggctcacacctataatcccagcactttgggaggccaaggcaagcaggtcacctgaggtcaggagttcgagactagcctggccaacatggtgaaactgcgtccctactaaaaatacaaaaatcagctggatatggtggtgtgtacctgtagtccccgctactcaggaggctgaggcaggaggatcacttaaacctgggaggcagaggttgcagtgagctgagatggcgccactgtactccagcctgggtgacagagtgagactccatctcaaaaaaaagtatttgtgatgtttttgtttctttgtttagagtggggatctcgttctgttgcccgggctggagtccagtggcatgccaccacacccggctcgttttttttttttctctgagacagggtcttgctctgtcacccagactggagtgcagtggcatgatctcagctcactgcaacctccaccttcccaactcaagcaatcctcctacctcagcctcctgaatagctgggactacacgtgcacatcaccatgccaggctaatttttatattttttatagagacagggttttgccatgttgcccaggctggtctcaaatgcctgggctgaagcagtccacccgccttagcctcccaaactgctggggctacaggtgtgagccactgcacccggctaggttttttatctttttagacacagggtcttactatattgcccaggctgatctcgaactcctggcctcaggcaatcctcctgcctcagccacacaaagcactaagattacaggcatgagccaccaaacatggctataacattaatctttaaaatactaacagaaactttttgaaaagtcaagtctctaacactgttcactgaaagaacctagaacaatatacacactcaacacccaggttttggtctctaaataccacagcttccttgaaaaacagctgattctagggtgcggaagggaaagttcaaagtcagcccaggacatcttgcagtgccacaaagcaggaagcacacaaagaatgatacaaacacatgaagaagacacaagaggctagccagttggaactgcaggaagactgactgactgtaacaagtcagtaaatagtgtatgggtctatagtgacactcaaactcaaaggggcattgggggaatacctcttgaaagagaaagaaaaaagaaaaagaattagaaaaatcaccattttgcaaacaccaatgtgataactggttcaggcaaagctcatagatgtgaaacccactgagtaaatggctattagggaacaggatatgccaaagtatcaccccatagactgtttactaaccatgagaactaaatgtcccttcacaatggacaaacatggcagatatccccttaaccaagtgaccaaactttcccacatcggaaaagccaggccgtacatgcctggagatgtactccaatatgaactagatggcagcaaccaaggattattcctgctaaagatgtataaactgaatctaaccaagcctcagacacaattcccatttaacaaaaaatgtaagggaaagagggacgagttacataactccatcaggaaaaaaacagacagataaagaaacaatcaggacattctacaaaacaaccggcctgctagggtgaaaaaatcaatgttacaggaaaaagaaaaaggtatggggtgtaggggcagtttctgtgctatagcaggagacataacaactgaatgcataccaactcaactatgaatagattctgaacggtcccacagtctggggatttttgaaaatggaccattagaatgtcagagaattcgtgtttattttcttaggtataatagtcttaaagtggtacaggagaatatccttattctccacggatgcctaatttaggggtaaagcatcctgatgtctgtaatttactttcaaagggttcaacaaaaaaatccagaattacgtatacacataaagcaaaagtagcaaaatcttaacaattattgaacctaagtggaagatgttaactgtactaatctttcaacttgtatgtttgaaatttcacataataaaaagaggggtggccagggcgcagtggctcaagcctgtaatcccaacactttcggaggcccaggtgggcagatctcttgaggccaggagttcgagaccagcttgggcaacatggtgaaacctcatctctactaaaaatacaaaaaaattagccaggcatggtgtcatgcgcctgtagttccagctacttgggaggctgaggcaggagaattgcttgaatctgggtggcagaggttgcagtgagccgagattgcaccactgcaccgaagcctgagtgacagaatgagattctgcctcaaaacaacaacaacaactagaggtggctggcatgatggctcatgcctgtaatccagcactttgggaggctgaggtgggaggactgcttgaggctaggagttcaagaccagcctggacaacaagggggagaccacacctctataaaggatgaaaaaattagccaggcatggtggcatacccctgtagttctagttacttgagaggctgaggtggaaggacagcttgagcccaggagttcaaggccgcagagagctatgatttcatcactgcactccagcctgggtgacagaccaagcccctatcttgaaaaagccaaacagaaaaaaacaaaaactgggggtggtgagaataaataagttaattggggcatggcaattaaaataatacaattagagatactcagcatgaataaatctcagacacatctagcaaagacagccaggtgcagagtaatacccacaatgtaatgccatttaaacgaaacacgaaactatgtgcaacaattctgtatgttgcttcagaacagagtatctgtagcaataaacacacacacacacacacacacacacacacagtgaaaatgagacagaataacccctcaggccccttccttgatgggcacaattcataaggaaaagagggatgctgccattacacccacccagctgggctcacctgtctcccactgaccctgctgagaatttgcagaactgcttgactgccgacggcgacggcagctaccctctgtcctctttgaagagctggaggtgccatagctatagcgttctggagacactggaggaagagaagaacaggaagaagcattcagcctcctggccctaattcccacccctggaagaatgcctgcaccacgaggtgcctaagttccccagtagtcagagcccaaatacccactcattctcaaacacctcctgcagaggttgctcagatgcctcctaagagagagaacttatcacgacttggggcaatctaacccacgtctacggcagctcaaactgtcaaggttattctgttgatagtcatggtaagggtccctgtaatggccctttgccctggcatcaactgcccccagctctccccaaggagtaagcaggcctctgtgcaggctccccaaatcttctcttctagagcgtgatcttcagacatagatatccaaaaatgctgtcagctcttccctagagctgtccttctcctgcttatctaaatcctgtgggcttactctgggtcagggaaggccataatcccccctccccaaactagccactgcccctttagtaacccagacaaaggcttggtctattcatgcacacggctaccggcagcctgaacccctcccagcttctcatgtgaaggctgctatcctccaggagcacttccttcacaaggattaagggcatcaactctggggacaagttggctaggtttgaatcctggctcccacacttcccagctacgttctctgcaagccccttcatgacataacttcttacctccctctcttccctagcttgggtcccctctgctcctgccacactggcctctgatgatgccaaactcattcccacctcaggccttggatgctccctgggattttctcccctggggtctatgcatggctggcagtgcagcctcagggcaaagcctcccttcaccttgctgctctcctgactctctctattccattacttttagtcttcctacaacagcgtctaaaaataagttctcttattatctgattgcccccactaaacttaaacttcatggaacaaacaccttgtcagctccatcatcctgtatccctcctaggcccagcaaacaggattgttattatacgtgcaaactgcttaacttctctgaacttgttattttcttggttacagtgaagacagtaacaggacttccttgtgagattactgggagactataaggcactagttcatatgaagggctgacagctgtgcctggcatgaaacaagccctccgtaaacagtggccaaaatcatcatcactgatgtggccaaattcccaaagccatgctttcttcctcttatgttgctcattgatattgtgggaagagagagtagcagaatgggacataagctgcctgatatggcactgtccgtatcagggcaccagggaggcccagcgggagccaggccctttcctcccaggaagtgtgacaccctcccattcaaccgtacctggccggcgccgcttgcgcgccaggtgcggcagcaggtcgtggcgggccagcacgcgcaggagttgccccagcagccgcaggttgctctcgtcgcactgcccgcggcgctccagctccagcaggagctctaggccgctgcgggcccgggctaagcctccggcggcgccaggagcctcatccagcagaaaggccaggagctccagctcgcactcggtcagttgcccgcccaccacctcgaacatacggtgaagcgacagcatcccgtagtagtccaggcactcatcctcctcccagcacggggccggggtcgacccggatagcgccattcccgggggagggaggcggaacaagctcagaacccggcctagaacccacacagcggggagggggcagtggtcagcgacgcggaggcccgaaccccacaccgccagcgcgtctcccccgcccaatcgcgccgggcagggccgctcccgcacccccaaccgcctcggcctccccctcccccgggagggaatggtcccgcccgaggtcccctaagaacaggtcgggacgccggagcccgctcggcttctgcccccaccaccgtgctacgttcggagctcgcctccggacctgaccaaacgatgcggcccaaacaagcctcggggcccaccccggggctccctgctgactgcccctgactctgggtaggactgcccagacgagccccttttctccgtccagcggtaccgtctgatgagtcccccggctctacgcaagtggtacctcccgaaagtgaccctctgccccctacacagaggagcgacccaggcagcccctttgctccacacaggtggtaccgtccgaacccgaccccctcgccctgcaagggcggccccgcccgctccccagagcccaggtggtcctgtctacccgccaccagtcaccattaggcctctctggatcctcaccagattctggcgtccgatgactcctgggcgacggccgcagccacttgttttggatctttctggcaccttctctattattacgcctgcgtcacctcgcccctcctccttcccccaactcgcgcaggtgcgaccgccacgccccttcggcgcatgcgcagaacgaggcctccaagccccgcccttcctgggccgcttgacctgcccccaaccgaagcatcttggttcgcgagtgctgcgcttgcgcagagcgagagcacgccgcctcttgggctgtatctggtacccggttccaggtccctacttcctgcccgtgactcaagccaccggggccatgtagcgccacgtcacgagtagttgtaactactcatctcataaactacagccccctcctgatcacgagctagacgcccacatcaccactgcccctagttgcccgtggcaaagtaacacaatcactactttcccgtctcccagtaaactcccaggccttatatgatctggtcctgggcactcctccattagattgtccctcacttctagtgacaaccagggatctacatctcaactgtgctctctcgtgatcccaaatggaaatcccgcccccccaccaccacccccgcagtctataagttccttcccctgatcaaaaccagaattccctcatctcacgttcaggacggatacctccttccaagcggcaacagaaccctccattccgactgtgtacatctcgatggcgtccatcacgacccccatcacagtcagatgtctccacccagagccaaaacggcccctccgtaaccccttccaatctctgccctccagggtcgcccagatacccgctccctaacttgcaacaactagagagggtctgtcagggagtctaggctgtggtgtatgcgtgtccccttaccgcggggccttgggtgtgacggtcgccacgccccccacttaggtgactcaaggtcaggacctgcatgtacttgagacaagtcccctccctggacctcttcccacccccgcaattaactcctcttgggagtcgggagatctgggtcctgcctagcactggcccagtactggctctgcctgagctgtagcagtgaattcaaaagaatcggctgcgcgcggtagctcacgtctgtaatcccagcactttgagaagccgaggtgggcggatcacacgaggccaggagttcgagaccagcctggccaacatgatgaaaccctgtctgttcttagccggatgtggtggcacgcgcctgaaatcccaactacttgggaggctgagacaagagaatctcttgaaccagggagcagtaagcagagatagtgccactgcactccagcctgggccacagggcgagactttgtctcaagaaacaaacaaacgccaggtgcggtggctcacgcctgcattcccagcactttgggaggccgaggcgggcggatcacctgaggtcgggagttcgagaccagtctgaccaacatggagaaaccccatctctactaaaaatacaaaattagccgggcgtgctgacgcatgcctgtaatcccagctactcgggaggctgacgcaggagaatcgcttgaaccctggaggcggaggttgccgtgagccgagattgcgccattgcactccagtccgggcaacaatagcaaaactctgtctcaaacaaacaaacaagaccggacgcggtggttcacgcctgtaatcccagcactttgggaggccgagacgggtggatcacctgagatcaggagttcgagagcagcctgaccaatatggcaaaaccccgtctctactaaaaaatacaaacattagccgggcgtggtggtggacacctgtaatcccaactactcgggaggctaaggcaggagaatcggttgaacccgggaggcggaggttgcagtgagccaagatcgtgccactgcactccagtctgggcgacagagtgagactccgtctcaaacaaacaaacaaaccctccaagaaatcccttcccctctctgggcctcagtttccctacttgtgaaacaaatggatggcaatggtaagctacggaagcatagtcctgggctaaactcacaagggggcctggtaagtgactatcattaaatcaaacgaagagtagggagaataggaaagcaatttaacaaactgtgaaggattctgtcttgctaagtgggttgtagtgggcgcctacagtgtatgagcgctgtgcatgtgtgatatcatccaatcccctaaacaatctttgaggtggctgtgactcaagctcacttcacaccagtaaaacagaggcccggagaggagaataactccaagtgtgtcgggctctaaagctgtactctcagaaatgctccgtctcttcagctttgaaatgacatctctgtcaaggtctcccgccgcccagttcactccatgggcccaacgctcaccaaaggttgcccgagtttctctacagaacttgccgacgcttagcccgggagcgacccagagaaatgcgcaggcgcatctcctcgccctgagccccgcccacagggcgaagatgtgtgcgtggataactcccagagccccgcctgtgtggcaacacgcaggcgcaaggtcgcgtgccctgcgctgcaggctctgattggtcgccacgggtaagggcaccgcccaatgggaggtgtggatagtgaggggtcccacacgcctggagccgagggtctgtgtcaagagcggcaggggctgcaggagataagagaaacgggtgagggcgccgcgcggggctggactgggaagagaacgctgggcggacggagggggcggaaggaaaactaaggggtctgcagggatcgaagagccttggggcctgcgctagggcgggagcggcgcgggctggaaggagagcactccttcctgtgtgccctggggctcctttagtgtgcgggagcctacgctggaactcgcccaccacccactgctgcgagctctcaccctgccgaggagctcagtctggtaggagacaagcgttgtaaagcgggaaagttgaatttccagggccctagtgggttccttcctggaaagacttactgatatactgtgtgaaaaacccccattctttccctaagtagttcacaattcaagagtgggagaaagaatcgtagacgaggaaagggcaaatttcaagtctcccgggccacctcgtagacatttattgggtacctgctttgtgcaagctttgcagcaggcactgggcctcgccctaggggagttctctgttggaaatggggctgtaatcaaggaaaaatggaactctcgggcccctggttgcctacttccaggaaggtcctttgtggaatggctgttgtgtgcaggggcctggcaactcaaaaattaggaaggggattggaatagtagataaggaaagtttagctccagctcctttagtgaataatttactcaaggagtatgtattgggcattaactgaaagcagggccctgtactgggctgtgtgttttgggaattcacagtctaatggggaagttggtctggtagaaatggactgtgcatagggacagttaaactcagggtcggccaggcagtggcttacacctctaattccagcgctttgggaggcctgggtgggaggattgcttgagctcagtagttcgagaccagcctgggcaacatagggagacctctctacaaataatttaaaaattagccaggggctaggtgtggtggctcacacctgtaatcccagcactttgggagaccatggtgggtggatttcttgaggtcaggagttgaagaccagcctgggcaacatgatgaaaccccatctctactaaaaatacaaaaattatccaggcgtggtggtgaatgcctgtagttccagctactcaggtgaccgaggcgggagaatcgcttggacccaagaggcggaggttgcagtgagccgagatcgtgccactgcactccagcctgggcaaaaagagagaaactctgtctcaaaaaaagtaaaataaaataaataaaaataaaaatttgccaggcatgatggcagatacctgtggtcccagctactcaagaggctgaggcaggaggatcacctgagtccaggaggtggaggcctcagtgagccaagatcgcaccactgcactgcagcctgggcaacagagtgagaccctgtctcaaaaggaggaaaaaaaaaaaaaaacctctcaaggtctcacttcccaagggaggctcactgcagcctccacctcctgggctcaagtgatcaaaccaccttagcctcccaaagtgctaggattgcagatgtgagccaccacacctggcctgggagcatttctcagtcactaaatatgtactgtgtgctagacattgttcttggcactggacgtgcttcagtgatgtgcaggctaaactgctaccgtctaggtgcttaatatgagcaacttttttttttttttttcctccttgagacagagtctcactctgtctccaggctggagtgcagtggcgcaatctcagctcactgcaacctccgcctcccggtttcaagccattctcctgcctcagcctcccaagtagctgggattacaggcgtgcaccaccacgcccagctaatttttgtattttttttagtagagacggggtttcatcatgttggccagcatggtctcgatctcttgaccttgtgatcgcctgccttggcccctagagtgctgggattacaggcgtgagccactgcgcccggcaatatgagcaacttctatatgcaaggctgtaaaccagactccacctgccctctggcactaatagattaggtgaaaaagaggtaaagaaggtgggtttgaattcataaaattagctgctaggcctgggagggaggcagtcatttgttgagtgtactctgagtccctgctgtgtgaaggggcctgggtggggttgagcccacatacgtagaagggaagatggggcatatagagggaagtttgaaagttaaaattcctgtccctgctcagaggttttgttgctgactggagcctccacaatgaatcagacccacaaactctcagtccagtgaggaacagtgagatgccaccccaaactcatgatatttgccatgatagaggtggcacaggataccataggaaccctgaggatgtagagatgtcagagaaggcttcacaaaaggtgctgggtaggagtttgtcagacaaaaagaggagagaagtttcttggcaaagggaatagcaacatcaaagacttagggtctaaaaacaatctttctggagaactacacagggttacagctgacctttacaagtaccagggactttgtgtcagtactacttttagccccattttacaggtaagaagacaacctcagaggaagtaagtggtagagctcagattcaagccaagggcagtctggttccagggcctgtgtttttaaacacttgggtgtatctgtgtgtgtatatgtaagaggcagaggaaaagcattgcacaaagagaaagctgcacgcaggcaaaggctatggtattctcagaaaaggtgtgcctggccctctcggtaaagaggccaggctggctgggccgggtgtggtggctcacacctgtaatcccagcactttgggaggccgaggcaggcggatcacgagggcaagagatcgagaccatcttggccaacatggtgaaaccccatctctactaaaaatacaaaaattggccgggcgtggtggctcatgcctgtaatcccagcactttgggacgcccaggcgggcagatcacgaggtcaggagattgagattgtcctggctaacacggtgaaaccctgtctctactaaaaatacaaaaaattagccgggcgtggttgcaggcgcctgtagtcccagctactcgggaggctgagccaggagaatggcctgaacctgggaggcagagcttgcagtgagcagagattgcaccactgcactccagcctgggcgacagagcgagcctccatctcaacaataacaacaaaaaaatacaaaaattagctgggcatggtggcgcacacttgtagtcccagctactcgggaggctgagacaggagaatcacttgaacctaggaggtggaggttgtagtgagccgagattgcgccactgtactctagcctggcaacagagcaagagtccatctcaaaaaaaaaaaaaaaaaaaaaaagaggccgggctgttggccggggtggtggctcacatctgtaatcccagcactttgggaggccaaggcgggtggatcacctgaggtcaggagttcaagaccagcctggccaacatggtgaaaccttgtctctactaaaatatatatatatatatatatatatatatacaaaaattagccaggcatggtggcacacccctgtagtcccggccactcaggaggctgaggcacgagaatagcttgaacccaggagcgagaggttgcagtgagccaagattgtgccactgcactccagcttgggtgacagaccaagtctctgtctcagaagaaaaaaaaaaaaaaaaaagaggctgggctgagtggtgtttctctcctgcaggctgccgtggggtgtgtgtaggcttcagagacatgggatcacggaagactgaagcagaaacagtggattaagacttcctgagcgatagctggtgagtagtgggatgtgcaagagaattccacctccccttggtttcctgctgtctcactggctcctgcccctctttctccaggcactgccttccccacaatggcagaggtggtggctgaggtggccgagatgccaacacagatgtcaccaggggcagtggagatgtcaacacctatgtcggcagagatgatggagatgtcaacagaagtgactgagatgacacctggggaggcccttgcctcatccctcttcttccagcatcaccagttcatgtgctctgagtgtggcagcctctataacacactggaggaagtcctctcacaccaggagcagcacatgcttgctgtctcagaggaggaggcactgaccacacagaatgttggcctggagccggagctggtgccgggtgctgaggggcccttccagtgtggtgaatgcagccagctcatcctctcccctggggagctcctggcccaccaggatgcccacctccgagagtctgcaaaccagatccaataccagtgctgggactgccaggagctgttcccctcgcccgagctgtgggtggctcatcgaaaggcccagcacctttctgctacggtagctgagccaccagtgccacctcctttgcctcccccaacaccactgcctccaccttctcccccatccgaagtcaagatggagccctatgagtgtcctgagtgctctaccctctgcgccacccctgaggagttcttggagcatcagggcacccactttgactccctagagaaagaggagcgcaatgggttggaggaggaggaagaggacgatgaggaggatgaagaagatgatgaagagatggaggatgaggaggccatggcagaggtcggtgatgatgctgtgggaggtgacgagtccacagctggctgggctcagggctgcggggactgtccccagcaccagccctcagcaggggctcgccggcaacaccggcggacggctcacagcccggcatctgccacccaccccttccactgcagccagtgtcagcgcagtttcagctccgccaaccggctgcaggctcatgggcgggcccatgttggtggcacacatgagtgtacaacctgctccaaggtcttcaagaaagcagcatcgcttgagcagcacttgcggctgcatcgcggggaagcccgctacctctgtgtagactgtggccgcggctttggcacagaactcacgttggtggctcaccggcgggcccacactgccaacccattgcatcgctgtcgttgcggcaagacgttcagcaacatgaccaagttcctctaccaccggcgcactcacgccggcaaaagcggggcacctcccacaggagcaacagctcccccagctccagcggagcccacccctccaccaccaccccctgccccacctgcccagctgccctgcccacagtgctccaagtcctttgcctcagcttcccggctgtcccggcaccggcgtgcagtacacgggccccctgaacggcgtcaccgctgtggggtttgtggcaagggcttcaagaagctgatccacgtgcgcaaccacctgcggacacacacgggtgagaggcccttccagtgccactcatgtggcaagacctttgcttctttggccaacctcagccgccaccagctgacccatacgggtgcacgtccctaccaatgcctggactgtggcaagcgcttcacacagagctccaacctgcagcagcaccggcggttgcacttgcggccagtcgcctttgcccgcgccccccgcctccccatcactggtctctacaacaagagtccctactactgcgggacttgtggccgctggttccgcgccatggcgggcttgcgactgcatcagcgggtccatgcccgagctcggactttgacgctacagcctcccagatcaccatctcctgccccacccccacctccagagcctcaacagactatcatgtgcacagagctgggggagaccatcgccatcattgagacatcccagccactggcgcttgaggacaccctgcagctgtgccaggctgcactgggggccagtgaagcaggcgggctcttgcagttggacacggccttcgtgtgacgcagctgaaaagcaacaacaaaagggtttggttgcaacagccagtgtgggtacctctggggagagaggacctcctctgacaaactggtctggtacccaccatgtgccaggatccaccctggcctctttttacccactgactccccagaacaacccttccaggcttctcttgtcatctttctctgcctgaggggaaactgaagctctgaaatgcgatgtgatctgtaccaggtcacccagctatgctgcaaagtgggttggccaaggccctttgcactgcatcaccctggtgcccagcaacatcaggtaaccttcactgagcaccaagcttatgccaggtctgtgctggccactctcatatacctcttcagatcctctgcttgtacccccagcccttgccttccctggattttgggcacccaggactttgctctgcctggtggagggtacttgatttctctgggcttccttcatctcaattctgacagtgtggaaggaaatctgtaggtacccaggtcctcagctccagactgggtgatgctggagacccaggagcaagtcagcacaggctctgcccacaggaggcatgcacaatctggtaggagaaacgcacaagtacagatagcttgctctctgagtgtgtctcattgattcattcagcctgtgtgtcctaaagcctcccttctcccatactgggtgatgctgggggcagagatgagtcaggcctaaggcttctctgggctgtgatggggatgtgcagggacagtgggatcccaggaaacagacctccatggtgggagatcaggagttaaggacttcctagagaaggtagtccctgaaggaaaagtaggaatctggcagtgaaagaggaaaagaacattccaggcagacagcactgcaagagggtgagctcttggtgtatttggagaccatccagttattcatctgactgcctacctgaggcaagcaccacacttaccactgtatgtgtactatgatcccaacaggcttgtgacatagatttcatattatccctgttgtatagatttttaaaactggtggctgggcgtggtggctcacgcctgtaatcccagcactttgggaggccgaggcgggcagatcacgaggtcaggagatcgagaccatcctggctaacacggtgaaaccccgtctctactaaaaatacaaaaaattagccaggagtggtggcgggcgcctgtggtggccagctactcaggaggctgaggcaggagaatggcgtgaacccgggaggcggagcttgcagtgagccgagatcgcgccactgcactccagcctgggcgacagagtgagactccctctcaaaagaaaataaaaataaaaataaactggccaggtgcggtggctcacgcttgcaatcccagtgctttgggagactgaggcaggaggatcacttaaggccaggagttcgagaccagcctgggcaacagcaagacctcatctctacaaaacttaaaagttagccaggcctggtggcacatgcctgtaatccgagtgctttgggaggctgaggcaggaggatcactcgagctcaagaattcaagacctgggcaagagagagagactttgtctctattaaaaataaaaatgattggccgagcatggtggtgcacaccagtattcccagctactctggaggctgaggcggaggcaggattgcttgatatgagggagattgaggctgcagtgagctgtgttcacaccactgcactccagtctgggcaacagtgcaagaccctgtcacttaaaaaaaaaaaaaaggaaaaaaaaactaaggacagagatttgcccaaggtttcacagctaggcagagatgtgagatttgagtacgggaggcccctgcggcccacatttgtaacccatactattctgagtgattaagacctgaaacttgtgcaggggtaggggatcagaggaagattcattctaactagaggaaaagtaaaccagtgtcagagctattgggatttgaaggggcttcgaaacatcaaaggtcttgagagcaggaagattcccacctttttcagaggttacctaggataatagtctttctctccattgattgattgattgattgagatggagtcttgctctgttgcccaggctggagcacagtggtgcagtctcagctcactgcaacctccaccttccaggctcaagcgattctcctgcctcagtctccctaatagctgggattacaggcccccaccactgcacccagctaatttttgtattttagtagagacagggttttgccacgttgaccaggctggtctcaatctcctgacctcaggtgatctgcccgccttggcctccctaagtgctaggattacacgtgtgtgccactgagcctggccataatagtctttatctccctaagcacatgcaggtgattcctgataggctcctcccaggcccctgcagcccagggtgctcaggcagggcaggcagaatgcagttggggatggaattgtccaggagggaggcctagactttggaaggccttgaaagctggctgagtagttccaggttgggggagggtcgtaactggtgttagatctgggctcaaagtggggtgagtgggaagctaaagatggtccagcagaagacagggctggacctgggaaggggtcatggggtggtagaagggtgagggacacctcactgacttcacggctgaccacgtgtgagtagcagggaggaaggcgtccccaggatcccaaggtctgcccctcgcccagaacagccatcctcccccttatccatcagcttgctctgtatgttcattcattgatactacaaaccaggcgaaatctgggtggtgttgagcaaggaaggggcagggtctgtcctatcccaggcagtgtaaagatgcccctggagtgggttgagcaaactggagagcccagaccccacaggaacagtcccttcactccatctgggacatttgaaactcctccctttttgttcaccggtggaatccagtagggggcatacccattgctcctccccaggcccccttccacctctggggtgtcctggccacactcactgctcggtgccatgtggaggagataacatttccttccgcccatgccccactatctggccccagcatgttttaagtgaggataaaagtcaagttctctgtccccaccttcacagggttgtcacttcccaacatccctaagaggtggaccaggtaggtgtcctgtttaagacttggaaatgaaggcttggaatcttctagggttccatctccagccatggccacccaacaaagagtctacaagcaggctaagttttggcctgagtgactcctcatcatctcatgtccccccagaccctagagcagcaggcagcttgggctaagacagacggcccattgttcaagtcctgactcttctgtcacttaagctccatggccttcccctctctgatccccagttggctcaccagttactgggaggttaatccctccctccctaagcagaagcagatgatttatgctgggtcatggagcaggctcctcctaggcctctacagcagataacccagatggagctcatcaccacacgtgcagagaaagccacggtgtgagaaggttgggcacctgagccagggccttcggacagccctctgcctgagatgcagctcactcccgtcccagaacagtccccccaccggaagcccccaccacctcagcggaaacaggcagccggacagaaagcaggttttcatgccaataatttattgaacggaggtctgtacacaggcaaaccttactgtggaaactaagacatcaggagctctctccactcccctggccctccagggtggggtgaggagggagtagaccttgggggcagaggacaggaggggagttacagctgtaggaggggcggggccaggttggacggtgcgaatcgacgttttctttaagaaaaaaattataacaatctatttacacccgggggccagggaagggaagaggagacgggctgggctggttctatttacaagggacacaggaggggagggggtctggaggaggtggaggtctgggggaggggagggggccaagggggtaggaggtcctcatccccccaacaccctgtccttctcttccctccccacaaccagttaaaatcctcttaaaaagcccaccacaggggtgaggctggtgagggagggactggaggtggggacagggactcatttacctctgccctctagtctaggggcccagccagggcaggagcttgatgggctatggccccccttcccagcccctcttggggctcccagatggaagtggaagggtgcttggtggggccctcaggaggagttagtgagggtaggtgtggcatcggtcgactgccagtctgagctggtcggagtctcagttaaagctggagggaggcagggaaggagcagagttagcctttgcctttcagacaccccttcgcccaacccaaaagtaggaattctcttgtcatagatgctacattaaaagttacaagctgttactttaggtgaagggttgcaaactcaagtgctaaagggccacgatagtaactgagtgacacaccagagtgccaggctccatataaggcggtggctgggctgggcacagtggctcacgcctgtaatcccagcactttgggaggctgaggtgggcagatcacaaggtcagcagttcgagaccagcctggccaacatggtgaaactccatgtctactcaaaatacaaaaataagccaggcatggtggtatgagcgtgtaatcccaggtacttaggaggctgaggcaggagaatcacttgaacccaggaggcagaagttggagtgagccgggattgtgccactgcactccagcctgggtgacagaaaaagactccgtctaaaaaatataaagggcgcccactgtctactgtcagtaggatgggcgggcccattgctgcccaatctgattttcttccccaagagaaacaggaaatctgaatttttacataaaatagccccatttttaaacgtggacaccatggccaggcacagcggttcacgcctgtaatcccaacactttaggaggccaagcgggaaaatcacctgaagttcaagaccagtctggccaacatggtgaaacctcatctctagtaaaaatacaaaaattagccaggcgtagtggtgtgtgtctgtaatcccagctactcggaggctgaggcaggagaattgcctgagcccaggaggcggagattgcagtgagccgagatcgagccactgcactgcagcctgggtggcgagtgaaactctattgcacaaaaaaaaaaaaaacaaacttgggcaacgaattcaactttttgtttgtgttcaggccagacgttatttctctggctttcccattggcattaaacacatttaaacatttgtacgcaagaataccctctaaaggtggtcattcacatgttgtaagatgtgtttcctatgccatcaaaatgtcgatgatttaaaaatacattcaggaaacccagtcactgagcgaacagccccaccctctccaggctgagagatactttaacccccagcagatggtccccacttaccttgtgaggacggggtgagggtggtagtgcccgctggggacctcaagtgaggagggatgagaatggcgttgagagacggttggatggagagttctagaaacaggaattgacatgctagtcagggtagactacagcagggttatgatgggcaccaaatgggaacccagctattgggaaggccagttgtttgtggacaccttcagccacagacctctctcaatgaaaaaccagaaaaagcttagcacaaggcagatcacagtaaagcacaactgaagcaggttcgattccccctgaatctgggagtcatctttcctgagccccaggcctgccttgtaccctgcccttagctccccactcctgcttcaacaccaagctcctcacaatctttggctgcccccctaccccgccccactccccagatcccaggctatgccctcaccaccagcactgaagttgaagagagggggaagtgggcggttgttaggcagctgggttcccagacatcgcagttcatcaaagaagctgtgcgcacaggcctctagtggggagagccttgaggatggggtgtactccagcaggctagagcagagcgcgatggcctctggcggcgttcgagatttgaacacctgagggatgggtgcagggctcatgagggtgagatgccctggacactggcatactcctgttatctcactgccacagtgcctgcggcaagttatgactggttgcttcccacacccccaccttccaaatgaagaaactaaggcccaaccactaaggagaggtcagtttgtatcgggtaagcaggcagcccaggtctgggactatatgagccctgctgaccctccataaaaattggaatcttgaatttacttgtgggttctcaacttttaaaatgccataaactttgaaagcggatggatgttattgatccctggataactcttcaaatcctcccaagccgtgattctgaggctaggtccacagaacagttgacctccaagggggaccagctctcagccatactgccctgagcccctagccctgccccacctttgtccaggggtgagctttaatctgagggaacttgaactccgtgtagttggggttcatctctcggatttgttcccgggttggtgttcccagcacctgtaaagagagggaggggtctgagacaagggccccatccctcagccccaccccctgcccagcccagccccgcccctcaccttgatgatctccaccagctggtccaccccactgtccccagggaagatgggctggcccaagaggagctctgccagtacacagccagctgaccaaacatctgaggggaaatggagggagcgtcagggctaggcgagtagggccaccaacctcccaatgcttttattcctcatggccatcctaagagtgtcaggagccccgttttctcaaagacaaagcacctggcccaaggtcacatgcagcttagaaacatgggcccgaccttgaccctgcctttgctgtactctctagtctaggtgtgtttccagccctcagttcctctctctgctaaggaccccaatgagctccttctctcccgctagccttggacgacagaccaaattaggcccaaacctgccaacaggcacccatgttctttgggccacaggaaggtacagccttaaatcctggactgccttcctcttgttccagcctctctcctgcccatgagaagagctgcagcgtggcagtctcacccctccctgctttgtaccttgacccccacagcacgagttcatacctaaggactccacagttcgtcatgctgctgtggaaggtgccctttcaaactctcatgcccattccctcaattcagacttcccctcatgcctggaaaatggcagttgtccccacaaacagggaaggacacagaggccctgggagcaagttgcaccttcatggtggcaaagccttgcttcccggttcccccaaggtctccagcagcccttccccctagctgagaacagagggctgacagggaggttccagagctggtatggactctggagtcaggtcagctttcaaatcccagtcctgcccagtcctagtggtgccagtgcgggcaggcggcctcacagctctaagctcatctgtaaaattagcattcaacagcatcagcctcctaagtttgtgaggactggatacaagaacagaagttaagctttcatcaccaagcttggcatacagcacacagaaaactccaaaacttcccagattgccactccccccgccaccctcccataactctgaccgatggatgaggtgtaatcagtggctccaaagatgagctctggggcccggtagtagcgagaacagatgtaggagacattgggctcccctcggaccaactgctttgcactgtgggaagagatgggcaggggtacacgtgaggcaagggttggggtcccccctgcctcttcagccacccaacatgccccaggcccacctgccaaaatcgcagagcttgaggacagcagtgtcagggtccaccagcaggttctggggcttgatgtcgcggtgacacacgccctgggagtggatgtaggccaagctgcggaagagctggtacatgtacacctgcggcgggcacaggatagcagaactttagcccagctttccccatacagcaccactaccccaccagcttggcctgaagagcccttccaggcccactctccctgctgcccccacagctttggggaaacccatttgaaaccttggttctcttaatgtgcaccacaatcacttgaaggacttgttaaaacagggactactggctgggcgtggcgggtcacgcctgtaatcccggtattttgggaggccaagaccagcctcgccaacatgttgagatcccgtctctactaaaaatacaaaaattagccgggcgtggtggtgcacacctgtaatcccagctactcgggaggctgaggcagaagaatcacttgaactcaggaggcggaggttgcagtgagccgagatcgcaccactgcactccagcgtgggtgacagagaccctgtctcaaaaaaaacaaaaaaaaagggactgctgggccccactcttagagtttctgatcagtgagttctgaatgaggcatttgcaacaagctctccagcactgatgctggtccccggaccacactctgagaaccactgctttaatcacaacccttggcagaagcctgatgagtaaggtacatcgggaggttgtcataaaacaggctagggagccaggcactcagcttccccctcaccaaaaccactggctccttaatccgacaatcaaaaccacccctgagcctgccccctctccagctccattttcctgccactctccctcccactgactagaacagaagtaccgtgagagcaggattttgagtttcagttactgctgcatcccccagggcctagacagaccaggtcctgacatggctgcttcctaggcccccttccttttattccagttcccctcggccaaagatgccacttccttgccctgtgcttggtctcctccaggaagccttccttgatccttctcacccacaaaccaggctgggtgcttcctccatttccagaattccctgtgctccttctggtatggcagcagctagttcatttaatagttttctgtgatgacgcctttctaccctaccaaactgagagctcttcaaggccaaggcctgggtcgcagtcagtggtgcctctggaattcctcagccctgggacccgtatgcaggcagccacaggacagattcgccaaaccagagagctcccctcctgggaagtgaggtccaacagccacaaccactggtagagcccacgtcggctcacccgtgcttggtacgtaaagccagcaggagcagcagctgggccccaagtgaccttcagcaaacaaacccacccacctccttccaatgcagtaggctgctccagcctgttcgccacatcatccctgggctgcaatcattcattcattcattcaaacacctcctgaaggtctgtaacacccagggcacgatgccaggcactggggaatgagcctgcacagatgatggacggagatgcattcctggctctgtggatgctaaccttcctccagccctaactccttcccacctacccccagccaaggctctaaaggcccgaactctggcctcagcagctgtctctgtgcagtcctggtccccaccacccccttatcctgagctaactccaacatctctggtgccactggactccctgtatggacctgagcaactacctggcagcttctgcaaccccaggtgtcaggctgccttcctgattcagtcaggccttgcctgccttggccctcccctgtgttaggcgagctccatctcggggggttatgggaacaacagcaggggacatggggcctccaaaaaccaacataaacttggcggatgagggatcccataaaaggcaggaggctccagagcccctggctttgtgggcctgggtcccagcagcccacctgctggcctaccttgacatagaggatagggatggtcaacttggccttggtgaagtggcgggccacccggtacactgtctcgggcacatattccagcaccagatttaggtaaagctcgtctttctgcagggagcaaaggagaggtgtgaggcactgtgagaagagtgaggagggggaaggaaggtatgcagggagcagtgggggaaaggcaggcaggcaggaaaatggctggagcaacccaccaccaccacctcgagatctcaccttctcgccactggagtagaaaaagtatctcagcctcacaatattgcagtggtccagcttacgcatgatctgcagctctcggttcttgagggcaaagggagagtctcagaatacaaccaactctctcggctgctcctccctactcacactcactcccaacaacagccaggcagctactccctgtgtcccagctccaaggtcccctggagtatcccccaattccttgtctccagactattcccctcccacaggagctggaagcccacaggttaaacccaggccacagatgtgttttcttcaccccatttttttttttttttgagacagagtcttgctctgttgccaggctggcatgcagtggctcaatatcggctcactgcaacctctgcctccctgggtcaagcaattctcctgcctcagccttccaagtagctgggattacaggcatgcaccaccacgcccagctaatttttgtatttttagtagagatggggtttcaccacgttagccaggatggtctcgatctcctgaccttgtgatccacctgcctcagcctccctgacctcatgatccacaggcctcagcctcccaaagtgctgggattacaggcgtgaggcaccgcgcccagccaccccacttaaaaaaaaattttttttcaacttattgctgacatgtaaaagccaaatggcaccttctgatttttttctccaaaataaagttttaaaaaggataggccagggccaggcgtggtggctcacgcctgtaatcccagcactttgggaggctgaggtgggtggatcacgaagtcaggagattgagaccatcctggttaacacggtgaaaccctgtctctactaaaaatacaaaaaaaattagccaagcatggtggcaggcacctgtagtcccagctactcgggaggctgaggcaggagaatggcgtgaacccaggaggcggagcttgcagtgagctgagatcgcgccactgcactccagcctgggcgacagactctgtctcaaaaaataataataataaataaataaataagataaaatttattattattattatttttaaaagaacctggctatgttggccaggttggttttgaactcctagtctcaggcaatcctcctgcctcgggctctccaagttcaaggattacaggcatgagctaccatacccagccttaaaataaaaataaaataaaaaacagctgggcatggtggctcacccctgtaatcccagcactttgggaggccaaggcagggaaatcacttgaggccaggagttcgagaccagcctggccaacgtggcaaaaccccatctctactaaaaatacaaaaaaattagctgggcatggtggcgcacgcctgtgattccaactactcaggtggatgaggtacaagaattgcttgaacccaggaggcagaggttgcagcgcttgaacccaggaggcagaggttgcagtgagccgacatcacaccactgcactccagccttagtgacagaacgagattctgtcttaaaaaaaaaaaaaaaaaaatagagaccatcctggctaactcggtgaaaccccgtccctactagaaatacaaaaaattagccgagagtggtggcacacgcctgtagtcccagctactagggaggctgaggcagaagaatcgcttgaacccggcaggcggaggttgcagtgacccgagatcacgccaccacactccagcctgggtgacagcatgagactccgtctcaaaaaaaaaaaaaaaaaaaaaaaaaagatttcacatctaaatccagttttcagtttgtcttgaaaaatcagggctaggtatgctggctcatgcctgtaataccagcactttgggaggtcgaggtgggggcggattacttgaggtcaggagttcgagaccagcctggccaacatggcaaaaccctgtctctactaaaaatacaaaaaaaaaaaattagccaggcatagtggcccatgcctgcaatcccagctactcaggtggttgaggcacaagaatcgcttgaacctgggaggcagaggttgtagcgggccaagatcgtgccactgcactccagcctgggtgacagagtaagactccatctcaaaaaaaaaaaatcaggcatgggcacatgaggcttgcccccctacctggcacaagcaacaacagacaggtagtggccatccagctcactctggtcccgtggaagcatctgggtcctcgaactctatctaggatcctgagtcccagactccaggcattggacttttcccagaatgcggtctcagcattcttccccattctctattcctcagtgaggcctaggaactccctgcccctacatccctcttacttctggaactcaactccaatcaaattctgacaccctggagctcctcctgcccaagggccctccctgccaagaccgaggccctggtctggttcctttccagtctaggctcagttctcctacatccagactagtctaagctccaaatgccaggcccttaaacaccaattattcctcaacttccacttcctccatctccttctagttccctgagcctctcctagctcacagggcacctccattccattctgcgctggccaaacacctgggaagagcgcgaccttcagaaccacccgcgctagccctgccaggtccctttctctcctgggaagaagtgtaaccaaatggttaaggtagagggtttgggaatcagattccagccttgactggggcacttgctctatgacctcaggcaatcctcttacctgagtttgtttccctgcttttaaacttagcttacacttagaatgggtataaccacagtacctaccctcagagaatctttatgtaaattaaacaagaatttgcttattaagcacttacattgagcaaatgcccagtaaaagctctgggctctcctgggatccacatttcccatctttcacaggtctcatttcctcttttcccccttctcttctggcccatggctctgaaacccaagcctccagctctctggctcaggttctcccaccagtcacacccagtccccaaacctccctgtccccatcccgcccaagctaccttgaacctcttgtcctggagaaccttcttgatggcgactagttccctggtctctgccagccgtgcctggtacacgaccccaaatgagccattgccaatcactttgatgtccgtgtaagccacttcttgggagcgctctgggccttggcctagagtggctacgactgtggtcaccttcccgctgtcacctggggaacaaaggggatacacgatccactgacccatcctgcctgcgcatcaccctatcctggggctgtgggaggaagggaaatctctgcaggaagctcgttggggacctctttgtcccctcctcctctttgaggaaaggtggatgctgggaccttcccagtgacttttcccctcttcctttctgggaatcttaagtcctgctcccctccacataggaggatattgatacctaaatctctctgcttcaagggttggcaaccccaaatttctacttctaggaagcaacagatcactggtccatcttggtactgggagacatcagatgttgactccatctactctggatctactgccctctggcccctcctatttggagaaagcttgaccgagcctcttccacttcagggagcagtaaccctgaggtactcctactttaggaaagcactaacctctctcacagcctagaggatactgacctctaagtcctcccctgtagagctggtaactttactggttcttggtgacagaaatgaatgtcctctcctgctataagtgccagtgccctgaccctcactttttggtactttgaggttagaaaaaaacactgacctgacctcttcatctgagtggtccagagacccagacccctcactatatgtgggtggtccctaatggacaagcaccaaattatgataatgatgaacctgacctttattatcaaggagctattccagcctcagtcctttgaaggaaagctataattcccaattcccattattcaaatggtggcaaaccttggtgccattcttagaggatagtgacccctttgagtaactgatgaaccaaatccatttttttgtttttttttttgagacacagtttcgctctcgttgcccagctggagtgcagtggcacgatctcgactcactgcaacctccgcctgctgggttcaagcgattctcctgcctcagcctcccgagaagctgggattacaggcgcccgccaccacgcccagctaattttttatatttttagtagagacagggttccaccagttggccaggctggtctcgaactcctgaccgcaggtgatccgcccacctcagcctcccaaagtgctgggattacaggcgtgagccaccgcgcccggccaccaaatccattttgaggggccagtgacaagttctttcagagggagataaccctacatcacttttttttttcagagccaatgacaccataccttagaacaattattaaaaaagtataaccttagatccatattctgtaggaaactgtgacctaccctgctccattccatttttgttaaaggagacacaccaagccatgtattttaaaacatggactatggacttggtttgaaggatatgctgactcccaatgtctttatatctaaaaggcagtaactattaattctcaccattggcagtacagctcaacaagatttagggtgggtaatgatgccaggtcttggttttaatagggaagatgatctgagtaccaggtttggaaagcctggccctattctttggggacaaaacacagtaacctcaaagccctgcttctaagtgatattcgctccaaatccccatcttctgaaggacagggaatgcagatccctctttttcggggttggtcttattcttgttctcttaggagacaataaccctagatccccatttgcaagcgactgtgacctctgatccaatattataatgaatagcaacatcagatacctgttcttaaggctcaaggacccaagacctcaataatggaagaacagagacttgtaacccgtttctttaagtgttagtaattctgatccacgagtaattctgatctccaagagatggtaaccccaagactccttttcctgggaggaagagggctcggatccccggtatggggaggcacagtgacctcgagctcctatctaagcacatgaaagaatctgatggatgtctgaggagctttgggaaccctaatcaccaccctacacgggcgccactagtactcacggcccagcttcaccccgggcggcgggaagctagtgcctgcgccggggcctccgctgcctcctccgccgctgccgccgggtccacccccggagctcgaggccccgacgcccccacccatggccccgacagatgcctttccgccgccggtgccgcctgggccggaggccgagcctccggggccgccgccgcctcctccgcctccgccgccgggctccgcgaacgagctagtccgcgccctgcccgagcccccagggccgcctcccgaaggcccgccgccgctcatggcgccgagcacaggcccaggctgcggggctcgggctgcccgggctgccccagccgccgccgctgccgccgcctcccccgggccctggcctcttccaggccgcgccgctctggcttgggctccggctccggcccagcgcccgccgcggggcacgccgggagatgcagtccggctgtcgtccgcgccgccgtcaccgccctcggcccgcacagagagccgcgtggcacgccgggaaatgaagtccacaaaagcctcagagtagaccgcgggaatgatgggcgggaatgacgggtcacgctgtacgtcgggaaatggagtccagggtaatctgtcagccgactgtacgacggggagccctgaagcactttaggaagcagagagcctgatgcacgctgggaaacggagtccactcactcagtctattagctgtgtatgcctcccagagctcggtgcgctctgggaaattgagtcggcccgcgtgaacctgcgggtctcgggccgtgaggcaagccgggaaatggagtcgtcgccacgccctcaccgcattgcaggtgtaaagcgatttttaaagcacgccgggaaatggagtctcaggtggtttttaagccccaggtggatactgcagttccggagatgggcgaggaaatggagtaggtttacgcgctcctctttccaggtacgctgggccgcagtccctgccgggaagtgtagtcagcaccaaggcctcagtgcagttgccacagcgagccctggtgtgttctgggaaatggagttcgacgtatcctccccattgactgagggggcgggatcgcccatgagctccaagcatgctggggaatagtccagacctgaccctctgtgaggccagtctgcggaggcttgccgggaagcgaagtccaatggccaccatcaggggcgtgtgaacgaaaggttagagactgcggcagttccctggagagacttaaaagtgtttcagcgcctccttcctcgcccccaggtccttctttaagaaagagccgaggtcgatcaaggactgctggaaaatggatccaagcacctttaagttccaggtgaccatagatcaggaaagaaaaaatgtcccctctctaaccgcaactctgcaaagattcgggaaacaaagttcccggcggtttctcagaacactaactagtcttcggatacagtctagcttttcctagcaatgtggttcgcaccaggaagctgaatggagcattaaaaagacggaaatgtcatttctgggcctggcgctgtggctcaggctgggcgccagtagctcacgcctgtaatcctagcactttgggaggccgaggctggcggatcatccgaggtcaggagttcgagaccagcctggccaacatagcgaaacccccgtctctactaaaagtacaaaaattagccgggtgtggtggcgggcgcctgtaataccagctactcaggaggctgaagcaggagaatcgcttgaacccgggaggcataggttgcagtgagccgagatcgcgccactgcactccagtctgggcgaaaagagtgagactccgtctcaaaaaaaaaaaaatcctgtcttgaaccaccattcagttttcagtttttggtttgttttgagacagggtctcgctctgccgcccaggctggcgggcagtggcgcaatcacaggtcactgcagcctctaactcccaggctcaagcaatccccccacctaagcctcccatgtaggtgggactacaggcgtgcaccatcacgcccagctaatttggtttggtttgttttttggggtggtggggggtagcggggtgggcttcgccatgttgcccaggctggtctccaattcctgggctcaagcgattctacctcagcctccaacgtgctggtatttcaggcttgagccacggcaccgggcctcccactcttgtgttttgcatcctccgcttcctaaattacaagatcccggaaagccaaaaataaggaagccagctgcctcaggttttgtgtactcagtgagtcgtcctatttatcgattaatacccgaaggagagtagcccccaaaaggcgctgggaaacagagttcctgtgtctgtatgtgtctcttcctcccccggaaatacttagaagtagaatgaaagcgttctcagcccctcccgcatcctggaatggtgggaaatggagtctctggacttcacgttaatccgagcttgtgcttatactaactgtcctgtcctttctgaaaccagaagaaagtcctgtccactcagtttgttcctgactgcaattccccgcggacacaactgcgggggtcggtagcgccaaagcctgttgagactacattacccagaaggcaaagtgcggaacacttccgctcccttcacaaagcaggtggccgcaccacgcgcggctaggcgcgggcgtttctgggagttgcagtttcccagccaaatggtacctgctgccctctgatggcagctctgagtcaaaaagtaaaaatttcagtcgagccccttggcctagggattccaacgcgggaccaagacggctcaaaagggcggcgacatggggcaggatagcgagggttatttaaccgccagaacccgtggggcatgcgccgctgcgtgtgggcaaccgccacgaggggattggggtccgtgggagtttgaaggtgacggtctgcaatctatcaggatgtttgtagaggatgagaatgttcatagagggatgctaggaagggttgtaaacgtctgagagaggcctatgggtgtctagaagggctaagaggagtccgtggagtggtgaaggggtctttgatgagcttagttgacaggataattactggggaccagtggagaagcctgaggggacttaggctgtctgctaaaagttctatgggtgggtggacgcgatggcttacacttgcaatcccagcactttgtgaggtcaaggccgtggatcacttgaggtcagtcagaagttcgagacccgcctggccaacatggaggaaaccccatctctactaaaaacacacaaaaaaattagccgggcgtggtggcccacgcctgtaatcccagctactcgggaagctgaggcacaagaatctcttgaacctgggaggctgaggttgcagtgggctgagattgcaccactgcactccaccctgggcaacagagtgagactctgttttgaaaaaaaagaaaaaaaaaaaaggtctatgggagacagaaattactggtgaccaaggggatctctgagcgacctgaaggggtgagggatggttgagaagcattgggaaggggctttgagagtctgtggaggtactggggctacacgtacaaagcagggaggtctctgatgagattaattaatatgtgaagtgccttgagagcatctgtaaagggctttctacttggaagcaaggatctcagaggatatggatgggaccaagggtgtcttcttgcaggaacatttcaagccagctagctaatagatttaggtgggcgattaaaggttagagtagccgctggagttttcaaggccaaatgccacctgtgacatcctacacagccagaatctggggcaacttgtctggtagggctgtggtctgacctggacagcagttagggagctgagctgagcacttatgattccatattagatgtggttagaggtgctttgaaggcactgggttcaggggctgaggccagtagttagggtcctctcctcccgagtgacaacatccccttctccatcaccccaccaccaccaccaactcagctgcaactatgttgccaggagacatgtctcatcccagcttccagaaatagcccagtggcccccaccccagggaatgacttacatcacccaggagagggagcagtttcccgcaggccgcctcgggagcctcggtttcctgccagtatcctagccctggatcctctcttccctgccaaccgacatcatctgggaccacccaccctggctggcatgaaatgagatgcgagtgggtagcagttgccagtcaacgtttcttccccctcagggttgcacagggtggagtttcatggcgaagccagtccaacaagccctcaattgccactccatctcttagcagctgtgtggccttggggaaaccccttcccctttctgggcctcaggcacctcacctgcatggtggagacagaacttgtctctaagggtacttccagcctggattattcctcctaattctttcatccctgattcaagctctccaatctcagcttctagctctatgagctcatctcaaatcctctgatcctgaaagcctgatctggatccaactatcttggtgttaggaaggaaaagtcaggagttgttgaaagaacgtgggctttgaagtcctggctcagccacagggccctgggcaagtcacttagcagcactggttgcccctaccttactggatactgaaggagctacaacactgcagctcttaagtattggacacacagtaggtcaacagcatcgatgactagtgagccagtcccttggctgtgtgctggctgggggtgttcccatacctggacctgaagatcaccaagttaccttgcaaggtctacatttcaagagacaccacaggctgttctccaaaggactcccagctgaactcagagcaacaagagaggggtgtgggcagggtgcgaggggcagtgcaaaagggagctcctggtcttcactggggacctggggtgtgggaagaattcctagccacaagtgggaaggcatccaggcaatcagaagagcaagggcagtggggttgtggtgaaaaacagtgggaagagctttcaaggacaaggtccccatggaacagaggagcagtctgatgaagccggcgcatgcctgagaccactatcatcaagctctggggctcatgtgcctctgaggtcaggagacggtttcccaggcctggatttggcccattctgattagggttaggccctctatactgatctggccacagacccactagcagccagggtggggcccctccttcagaatcaagcaaaagctgtggccctcagggggctgcaccgagcacctaggacattgatcactgcatccaaaggtccaaagttttattgttttgaatacattctccagcggcccctctactccccccaccctcagtccccaatacagaataaggcttgaccacagccccccaccccaccccagaggccccagctgggaggcagagggggcttccagtttggtttcagggcacccccttcccatccccccacccgcctgcccatgggccagtcctaggagcagctggggatgaaggggttggaccggtgctggggtggggagtgggagagggatagcaggcacttgtagagatttgtggcccatgggcggcacccctcaccctcctccgccccccaccccccaacacatggaatttttggttcattataaaattgtccctccctcccctgctgtgaccttgtggggtatgagaaacctaggcactcatggccccctggaggggcagggcaggcagggctggggctgaggagggctgggagtggggcagagcgggtgggtcagaggggtacaagaggcagagaacagggagggagacaaggctttacttcctaagcgattgtaatagaaaagttcctgggtgttaaggccaaagcctcaattcaaatataaattccccagaatggaggtgacccccttaacttccccctccctccccctaccaccactttgcccagagcttagaaacccacagagacagggaatagcccctagccctgggcacccacccacccccaccatttttaaaaaaaagaaattaaagttttatacaaaatgtggggagggaaaagggaggaggcagggaagagacaagagagctgccctcacctccagggcatagggggcttaaggcagcaaaagaagcatggggggtgcggggcacacaggtcccctgcccacagccctcaggagtctcggtgctccagggagagctgggccgtggcatgctggaggtcagagctcacccgccttggggtgaggggccccccagcctccccaggcccctccccacgcaccttcttgtcctcaccctcatcctcaaagcccccagcggggcccccacccccttcgaggcgacagtcttcactccagcgccgcttaaagcgtagcttgaggggcatgcactgggatgccccgggtgcctcgccgggctcaggcttagggggtgcaggtggggcacggggcgtcttgaacacctccccgtcttcctcatcctcatcactgatgtcagtcacctctacctcctccgactcgccttccgagatgggctccaccttgatctgtggtggcgggggcggtggggctagcgcccctgccccctcagccagcccgcctgcactgccaccgctcttgtcagcaccggctacggccttctccccagctgcccgctgccggcgtccgagtgggggcggctggagcttaaacttgaatggggaggaagaagaagaagaggatgacgaggccgaggaggggaccggtggggtctcgggtgccatgggcggcagcgggcacttgtcagggcgctggggctggggcaccaccagcccagggtagtgcaggaaggcgcgggggctgaggtggtagttgtagacgctttgggtgtgggcctgcaggtaccgtttcatgtcctcagggctgaaggagaagtgggagcctccccctgagccgctgggccccccgccaccactggggtacatcgggctcagcgtgggcgagggagtgtaggccaggtgggtgggcgtcatgggcagagccggggagagctgagggggcagcagggatccaggaccggccagaggcgacacagggaaggggctgaggggttcagggccaccccgaggccggggatagactcggaagacaccagggtcatggggcaggcgggccagcgggggccctcggaaggcacccagatccggagggccgggtggtcgggcgcggggatcctctcccagcggttcctccagctctgacgtgccatcactacagtcactgactgagcctcggcccaggcggcgggccaccacagccgagaagagggaagatgaagatgaagagcaggctggtggtgagcgggggtcctcggtgggggacagcacctcggagggcgttgagggagggaagcggaagtggctaccacccgacggcactggcggggcactctggggcactgcaccccctggcagaagggagacagtgtcaaggcccctggcctagcctgaaggggcatgtagaccctctccacaccaaccatccctggtactcaccagccaaccccacatcaatgaatgggtaattgaccagcaccagtttgttgaaattgaacttgtaggtgaaccgtttccccttggtcttgtgcagaatgcgcttgttatagtaatagctgtgggtacagaaatgccattgggaaggtcaggtacgtgggacccaggtctagactccacaccttaacacgcacttaggtgtggttcccaaaggccaactgaggaacgtaggccacaaaagacaaatcaagtgcccagagggtgggtaccagctctctcctcacatctaaggcaggactagaggatccactggtgactgtaatctctcctcaggatacgtctgtgttaccaaggggctcagggaagggctgggagtggcccaaggtcacacagctaggatttggcaaagccaggggtcagacccaatgcttgttcccacaggcaaggggctgtgcaaccccgggggggcactccacatgtgctcaggggtccccagcccgtcctcaccgcagggcccggctcagcttgtcgtaattcatctggggcttgcacttgcgaacgccccacagccgggccacctcatcagggtctttgatgacgaattccccgtagtccccctgccaggcaatgacgccctggtactcctccttccgcagcagctccaggataaagtgccacagctggatctgccttgagccaggggacgactctggcttgtaggcccaatccgggaaggcaaaccctggggacgggaggcagggagtggcctggggtcaggctgccaagtccagggctctgggtcccatcccagggtccacctctgccctgccttcaacatggggaaatctgtctcacctcagccaagtcaagatctgatttaagagaagacagtgcgtgtctgtctgtctgcatgtgaggggctagacaggagctgggggggaggggaagctggagcccgctccagcgacaccgggagaaacaggaaaccgtcggcggtgggtcccggggccagtgccagggggccaggcaccaagccaggctggcgggcagggctgccagtgggggaggggcaggaaggggcacacgtggccagccgggttggggtacagccccccagcttacccccactcccattcagagccagttgcaccaccccagctcctcggatgtcctccttagaaacatgcactgtctcctccgaagacccaacagagcccctactcccaaccccaagacctgagaggaagattttttttttttttcttaaaaggaccaggaggggtggggtgactcggttgccgatgaggtcagcgcttgcacacacagaggcttctgtcttccctggagagtgaaacccagactgtctgagaggccccccaagccctggaccctctgagctacactgccctccccagacccaggcatccaggccccacctggctggagggcccagcccaggcctggagcttgagcaggcaccctggagctgtcaccctcttcccacttctgccttctcatcttcagctccttccctgcccacctgcctgcccacccccagcattaaccttgggtagaggttggcggtgggctggctggtctctggagggggtgggcagcctggggtggggggtggggggtggggggactgcggttgttgtcatttcccaacaacaggggccatcaataattcagcaccaggcagccggtaatggaggggtgggaggagggaaaggggaggaagggaaggagtggggaggcagagcagggtccctggtgccactagagagagaaggccaaggtggccagctaaagatgggcggctcccaaatccagtcaggctgcaggggtcaatccgcctcccttggccccagctcaaacaggtaccaacaaggcctccaggcaacacatccaccctcaaagactccacccaagtctggaatccaacaagggatccttccccttgggaatccagggaatcagtagttcctgctcccacagggaccaccccctccaaatccagagctcactgtaggcccccaactcctgcccagactgggctgcagtaccacatagcccccggagtccctgccccattcagatatatcccagccttccaccagcccctcagggtgccagggatatgacctccagctgttcacagaccagcaccaacagcccctgttccatttaaaagtgacagcctttgacaaccccttccagagaccccagagcaccatcgctctcttgggaatctaggtgttcaacccattatcctcacccttctagagaatccagatcacaaggtctcctgcaaggcccagggtcctttggaacccaggtgacccagccaccagcttcatggaccctcatatcccctccaaaaagctcccagcccctctcagggaaccaagctccatgttacttccacctcagccccaatctggctctagacctagaaggggggccaaagcccctgagacatcaatctgggggtgggggatgtactgacttccaccctccccccaaaattaaagccacccttcccagcccacccgccccagcctccgtgtcccggtaaccaggcaacgtgtgtgcagcgacagtcctgggagcgggggagcaggaggctaaaaataaactttgcagaagagagggagtgagagagactacatgcaacacaaagggaactcggaaaggaggtgggggggctctggaaaggcctcaagccgcattctgggagctgtcccaggcccccttgttaaaccccttccctgagcaacccctcctccagggcctggaccctggctcccacttctggcagggacccttccccactcccaagcccaccacaacggcggctttcctcatcggacacagcatacatgaaggcctgttcccggctttgggggggggagaatgaagagggggtgacgtcagggtgtctcaatggggctctgttccccaggccttggagccaggagccaggcacgggcaaggggagcatgtgtgagtgtgctgtgtatgcgtccacgtgcttaaaacagggaaacaccagacctgcacggaggaagcttgggggtgcgggacctcgggaacatgggggccagtgaggcagggagagagcaggcacatggagagaggggttcaggagactgcgagacagagtgcagaagtggcagcagtcagacagcaagggctgggatggcgaggtcccagaagcacacctgggtcccacagaggcggggtagggattctcccagacagactatgcaagcctggggggacaaaactcctgggcaccccccaacctcacgtgacggcccaaactttttttaagggactatgagggtcggaagggaggagtggtggcagaggaagaacacgccggcctcctggggggccccaccacctcccccactccaggcggccctctatggcgccagagccgggaagaaaacaggaagtgggaaacagccacggcagagagagggaccgggatggagaactggatggaggggtgcggagcggcaggccaggaggcagacgggaaagatgcaccgatcggaggccattccaggcctccttcccctcccctcccccagccggaaaacccacacactgtcccgccccccgacagggttggggaagcgacccgcggatcctatcaggccaaggccggtagcagggagagaagatgaagcgaggttgtctgggtgcctcggcctcctccttgggcgagggtaggctcctgctgcccccagggcccagccacccgggagcgagtggaagccgggggagtgtgtaggacgcacgtgactgaccctaccgcactccgcaccccggccccacccccagggcccctcctcggtccgggtcccaatcccctggcgccggatcccagctcggagccctttaagattaagccgcccccacccgccgagcagggggatggggatgggaatggggtgggaatggggtggggatggggtggggtgggtgggccggtcggggcacacacccgcacacaggagcccgagccgccgccgccgccgccgccgccgccgggggaaggaaacaagtttgaacagcggcgcccggcccccttccccctcccccgtccccgccccgggccggattccgacggggtagacgggcagggggcggctgggacccctccccctgcgcgctcgggcgcaaagtccagcccgcgcgagcccgggggcggcgggggaggggagggggaaaagtccgagtgggagggggagttaatcccgctgccccccgcccgccgaccgagggggaggggaaccttggccccttaaggaggagcaagttggcggggaagagaggggcggagggaagagacggcccgctgaaagagaagaggtggatccgggagggggggcgaggggggagcctctgcgtctccccccaccttccccaccctcctcaaccccgggccaccggtggcgcgggaggagggtacccaggtctccccggagccaccttaaagccgcgcgttctaaggtcggaaacaaaaagttcctttttcgaacgttcgggctgcgctttggaactttgcgactcggcgagggcgggggagcgaggagccgacagaggcgggcgggggaggggcggcgcagccaggaccccgagtcccgggctccccactcacgccctcctcctagaggccatcccgtatcccccgctaacctggtgcagggcacgcgccgccgtgaaggtcaccagcaggaccgcgcagcgcagaaccagggatagcgggcccggtggacgagcccccccgccccgcacacgtcccggcccccagagtgcaacgtgacaagagcggaggggaaggaccccgccacccccgtgatcccgggagtgggggagagcccggcctgcggggtcccggtagggatacaggaccaagacccgcagcacccacaccactccgcccggagccaggaatcgggggtcccaggcagcaaccccgctcgcgccacgagaagcaacaggtctccagtgcttgaggggtcccccagaactggggatcactcgggctcccccggaccccttcagcccccccaaagtttctccgttcggtttcccggggcaacaagtctcccccacacgtgctgcccccgcccccacctgtgtccgccggggtcttcatgctggggggcccggggcgaagcgccccgattccgggccgcggctcccggcgccctcgctgccccgtcccgtcccgcgcccgtcgggccgccctcgccgcctcacccggcctcgcctctcagagcctctcccctccccgccgccgcctcccgggttaatatcgcactccggggccgggacgcccacgccccccggccggcgacgtcaccgccgcgtcgccatggagacactgcgcccgccccctccccgcgcactcacacacacgctcgtcggcgcgcagccactgaggaccggccggctctgggcttaaaggggccgcgcggcgggggagggaggaaggagggggtgggggtgggatggggtcccgcgggtcatgaccctagtcagaggctccgagtctgcagctaacttaagtcttcggcactcgctacctgctgcccctcctcctctcctgcccactgcgggctccagagtttcttttgggagcctgtatgggaaaacggggggcccttccgaggaagcgggggtcagaaacttttgtggggagggggcagaatcttctctgcagaggggcggggtcaggaccttagaagatgatgaagaccacagcatttcccagcttggttttacccaaccccccaaccctgagcctgaatgggggcagctgtccaggggtggggtggaatgggtgggatgcatttcccagcatcggaaatggggaggcggctgtgccctccgctcctgtggggatggggtcttggcttccctgataacccccgtccagctggggaggaagtgaccagagagaatgcatttggaagcccccaccaccaccgtccccaggctgcagctgtcccggggatagggctggcgccggaggtccccccacgtccactactaggaccgggggttccggaggcggggccgggatacgagggggcgaccaaagtctgaacaaatgtgctcccaaggggcactgagggtcgccaggagagaggaagacagggcttaagatcgaaagccagagcgtagagaagtgttaagtctccgttctctgcctcagccgggagggaaggatgaagcctgaggctctgggaaacaggaaatcacagcgcagatctgatggagcccaggagccggcagcagggtagaggccaaatagaagcaatattcacaggcatagcctggaaacagagtctcaaaaaagactctgaggttccgaaggaggggcgtatgggtggcgggcgggagttgggggggctgggtgggggacgaatccagaagatgggcggggagacagaaaagtcacagatagggaaggcctgcggagctcaggctcccggtacccagggcttcaatcccagcctcctcgcttgcggggtacctagtccaccttagacaggctcctcaccagtgcctaaaaaaaaaagtctcaggcctcctccttggggagaccaagggctccagggaagctttcccccacaacccccgggaattatgtaaccttgcctacggacagtacagctcccccacggatattgtaaccctctgggagcggtgtggtccagcaataataatcatcttcattgttcgaataacagctcccgaattccgagtgttcatgatgtgccaggcaccgggccaagcattgtcaggggcatcttctcatttaatcctcacaaaatcccaacgaggggaattactgctgttatccccatttacagataaagaaagtgatgctctctgagggaaaatcagtccactaaatcttacagccaggaagtattggaactaagattcgaacccagatctaaccaattccaaaccaccacatttaccctttaccattatgctttattacctcttttactaccccctccaaaaaaaaaaaaatgcagattttcaaagatactacatcagggcccggcgcagtggcgcacgcctgtaaacctagcactttgggagccgaggcgggagatcacttcaggtcagaagttccagaccagcctggccaacatggtgaaaccccatctctactaaaagtacagaaatttgccaggcgtggtggcgcacctgtaatcccggctactcaggaggctgaggcaggagaatcgcttgaacccaggaggatcgcttgaatccaggaggcggaggctgtagtgagccgagatcgctccgctgcactccaccctgggtaacagcaaaactccgtctaaaaataaataaataaaaaggctgggcgcggtagctcacgcctgtaatcccagcactttgggaggccgaggcaggtggatcacctgaggtctgtagttcgagaccagcctgaccaacatggagaaaccccgtccctactaaaaatacaaaaaattagccgggcttggtggtgcatgtctgtaatcccagctgctcgggaggctaaggtagaatcgcttgaacccgggagggggttggttgcggtgagctgagatcgcgccattgcactccagcctgggcaacaagagcgaaactcagtttcaaaacaaacaaacaaacaaaaagataacacatcagtaacaaacccagtgacccctaccctcccaccagcaagacagagatgagttacacccaaccttttttttttttttttgagacggagtctcactctgtcgtccagggtggagtgcagtggccccatctcggctcactgcaagctccgcctcccgggttcacgccattctcctgcctcagcctactgagtagctgggactacaggcgccccccaccacgcccggctaatcttttgtatttttagtagagacagggtttcaccgtgttagccaggatggtctcaatcttctgacctcgtgatccgccagcctcagcctcccaaagtgctgggattacatgtgtgagccaccacacctggctgttacacccaacctttgctacttcttgtctctgacaaggcaagtgaactcagttcacctctttttttttttttttttttttttgagatgggggtctcactgtgttgcccaggctggattgcagtggcacaataatggctcactacagcctcgacttccctgcctcaagcaattctcccacttcagcctcctgagtagctgggactacagacacatgccaccatgcccagttacttttttttttttttgagatggaattttgctcttgtcacccaggctgtaagtgcaatggcacgatcttggcccactgcaacctctgcctccctggttcaagcaattttcctgtctcagcctcctgagtagctggaattacaagcgcccaccaccatgcccagctttttttttttttttttttttttgagacgcagttttgctctccttgcccaggctggagtgcagtgacaccatcttggcacatcgcaacctccgtctcctgggttcaagcaattctcctgcctcagcctcccgagtagctaggattacaggcatgcgccaccacgcccagctaatttgtatttttagtagagacggggtttttccatgttggtcaggctggttttgaactcctgacctcagatgatccacccgcctcagcatcccaaagtgctgggattacaggcgtgagccaccatgcccagccaacccagctaatttttttttatttttagtggagttggggtctctctgtgttgaccaggatagtctccaactcctgggctcaaacgatccgcccaccttggcctcccagagtgctggaattacaggtgtgagtcaccctgcctagcgaagttcacctctttttttttttttttttttttgagatggagtctcgctctttcgcccaggccagactgcagtggcgctatctcggctcactgtaagctccgcctcccgggttcacgccattctcctgcctcagcctcccgagtagctgggactacaggcacccgccatcacgcccagctaattttgtgtatttttagtagagacgggatttcaccgtgttagccagaatggtctcgatctcctgacctcgtgatccgccctccttggcctcccaaagtgctgggattacaggcgtgagccactgcgcctggccaagttcacctctttgagcctcaattttcctcatttgtaaaatggaggtgttaatagatcctacatgatcaagttattgtgaaaaatcagagatgtggccaggcgaggtggctcacacctgtaatcccagcactttgtgaggccgaggcaggtggatcacctgaggtcaggagttccagaccatcctggccaacatggtgaaaacccgtctctattaaaaatacaaaaattagctgggcgtggtggctggcgcctgtaatcctagctactcaggaggctaaggcaggagaatcatttgaacccgggaggcggaggttgcagtgagccgagatcatgccattgcactccagcctgagtgacagggcgatactccgtcttaaaaaaaaaaaaaaaagaaaaaaagaaaaatcagagatgcaaagtaagtatgcaataaatactgttaataattattagcagagtgaactctatgccccatggataacaagagcactctaccctacagactccaactgtaacaacagttagagtaaacagcaataaacaggctggctgcagtttgtgtctgacacatgtaatcccagcactttgggaggccgaagcaggagaatttcaagaggccaggagttcaagaccagcctgggcaacagagtgagactctctctacaaaaaatttatttatttttttttttatttatttgagatggagtctccctgtgtcacccaggatgcagtgcagtggcaggatctcagctcactgcaacctcttcctcccaggttcaagcaattctcctgcctcagcctcccgagtagcctagattacaggcttgcgccaccacgcccggctaattttgtgtttttagtagagatggggtttctccatgttggccaggctggtctcgaactcctgacctcaggtgatccgcccacctcggcctcccaaagagctgggattacaggcgtgagccaccaagcctggccgggaggatggttcttactggcagatctgtgtccgtggtgtccaaagggcagcccaggcttatgttttctttttcttcttttttttttttttaatttttattttaagttctgggatacatgtgcaggacgtacaggtttgttacataggtaaacgtgtgtcatggtggtttactgcacctatcaacccatcacctaggtgttaagggacattttttcttaaaaataaaatttaaaaaaataaagcacactgcactgacagtgtgaaattgtgtattaatgtcataatcccactctgacccagatggttggctcaaactcagtgtttctatgaaacacaatcacggatgatcggcatgcctcgtgggagaatctgaacgatccgcggagagtgaaagtccctcgtgaaaatgtcgtctgggcctcttaagtttggtggtttgtgcaaacgtgtccatggatattgtaatctttcagtggcctatgtgactccaattgctttatcaacactgatacccacccccagagatggtagagatggtgaaatattggccaggtgcggtggctcatgcccgtaatcccagcactttgggaggctgaggtgggcaggtggatcacctgaggtcaggagttcaagtccagcctggccaacatggtgaaaccctgtctctactaaaactacaaaaattagctggacatggtgtcgggtgcctgtaaccccagctactcagaaggctgaggcaggagaatcgattgaacccaggagacagatgttgcagtgagctgagattgggttcaagtgattctcctgcctcagactcccgagtagctaggattacaggcgcacgccaccatgcccagctaatttgtttttgtatttttagtagaggcagggtttcaccatgttgccacgctggtctcaaactcctgacctcaggtaaccaccctctttggcctcctgaagtgctgagattacaggcctgagccaccacacccagcttttttattttttatttattattttttttttgaggtggaatttcgcttcgtcacccaggctggagtgcgttggcacgatctcggctcactgtcacctccacctcttgggttcaagcaattctgcctcagcctcccaagtagctgcgattacaagtacccgccaccacgcctggctgaaaaccctgttttcttcccccccgagacagagtctttctctattacccaggctggagtgcagtggcacaatcttggctcactgcaaccaccgcctcccgggttcaacctattcttctgcctcagcctcccaagtagctgggattacaggtgcccaccaccatgcccggctaatttttgtatttttagtagagatggggtttcaacatgttggacaggctggtcttgaactcctgacctcgtgatctgcctcagcctcccaaagtgctgggattacaggcgtgagccaccgagccctgtttctttctttctttttttttttttgagacggagtctcaccatgtcgcccaggctggagtgcagtggcgcaatctcagctcactgcaactcagcctcccgggttcacgccattctcctgcctcagcctcccaagtagctgggactacagaggcccgccaccacgcccagctaattttttgtattttttgtagagatgggctttcaccatgttagctaggatggtctcgatctcctgacctcgtgatccgcctgcctcagcctccaaaagtgctgggattacaggcgtgagccactgcacccggcctaaccctgtttcttaagaaaaaaagatagtgtgatgcgggggattgagtccaatctctccccctctgcaaaaccctgttgcagtgttctctatcaaaacaaaacaaaaatttaaaaaatgaatagtatgactcatctcatatggtatagccaccatacacagtgtgaccacctctaaacagaatgtcacccccttagagtatcactctttctcatctccctgactgaagatgctgaaggcaccagggctcagatccctcttttctcctgtctagactcattcccttgataacctccaccagtcccacagtggatatgccatctctatgctgattacacccacagttatttatttatttattggtttatttatctctctcctctccttctgtctccctccctccctctctctctctctctctctctcgtctctgatctctctctctctctctttctttctttcctctttttccttcttgacagggtctcactctgttgtctggctggagtgcagtggtgcgatcacagctcacagcagccttgacacccttaggctcaggtgatcctcccacctcagcctcctgagcagctgagactacagctgtgcaccaccacacctggctaatttttgtatctttttggagagatggggatcttactatgttggccagactggtcttgaactcctgggctcaagtgatgctcccacctcagcctcccaatagtgttgggattacagctgtgaaccaccgcgcccagcctccgcccacaattctatctcaatctcgactctcccctgaactccaatctggcacatccaactacctcaccagtgtgtctatctggatttctcaagcttgccaaatcaaaaatggtcttcctgaactcccccaaactgctgcccccacaagcttccccatctcaggaaattgcaattccattttgctggctgttcaggctgaataccttggagtcatccttgccccctttctctcatccgatatccaatctgaagggaatttccaccagctctacctttgactattctagaatcagctacttttttcttccttttttcgagatagggtttggctctgttgcccagggtggagtgcagtgacaccatctcggctcactgcaacctccgcctgccaggctcaagccatcctcctacctcagcctcccaagtaagtgggaccaagtcatatgccaccactcctggctaatttttttttttttttttttttttgagatggagtctcgctctgttgccaggctggagtgcaatggcgtgatctcagctccctgcaacctccgcctcccgggttcaagggattctcctgcctcagcctcctgagtagctgggactacaggcgcctgcccccacgcccgactaatttttgtaattttagtagagacggggttccaccatattggccaggctggtctcaaactcctgaccttgtgatctgcccacctcggcctcccaaagtgctgggattacaggcgtgagtcaccatgcccaaccactcctggctaatttttttgtgtatttttttgttgagatggggtttcactatgttgctcaggctggtctcaaactcctggactcaagtgatcctcctgtctcagcctcccaaagtgctgggattacaagcgggaggcattgtatccagcttattttatttatttatttatttatttatatttttctgagacagagtttcgttcttgtgtgttgcccaggctggagtgcaatggcacaatctcggttcactgcaacctctgcctcccgggttcaagcaattctcctgcctcagcctcctgagtagctgggattacaggtcagggtggtctcaaactcctgacctcaaatgatccacctgccttggcctcccaaagtgttggaattacaggcctgagccactgaaccgaactggattcagtctatatttttcactgccttgtcaccagcgcctagaccagtgagtgtcatagaataggtttgtaatattggctgggcacgatggctcatgtctataatctcagcactttgggaggccgaggcaggcggatcatgaggtcccaagatggagaccatcctggctaacacagtgaaactccatctctactaaaaatacaaaaaattagccgggcatggtggtatgcacctgtagtcccagctactcgggaggctaaggcaggagaattgattgatcccaggagacagatgttgcagcggactgagatcacgccactgcactccagtctgggcaacagagcgagactctgtctcaaaaaaaaaaaaaaaaaaaaaaaagagagagaataggctgataatatgtatttgctgaagtaagtgaactgagtgcacattcacctggtccaacccacaaaaaatatgaacccatacaaatggtgcaatgtccataactaataaacccccacatacagtgtgagccccagtgtagaaagtgagaccctcaaatgcattgtgagtctctcatatagatggcaagatagcatataaataatttgtgggtcacgcgcagtggctcatgcctgtaatcccagcactttgggaggctgaggtgactggatcacttaaggtcaggagttcgagaccagcctcaccaacatggtgaaaccctgtctctactaaaaatacaaaaaaattagccaggtgtggtgacgtgcacctgtaatctcaactacttgggaagctgaggcatgagaatcgcttaaacccgggaggcggaggctgcagtaaggtgaggtattaccactgcactctagctctggccaacagagcaagactgtctcaaaacaaacaaacaaacaaacaaacaaaaaaccaatttgtgccccacacaatctacttgtgagtgttatcgaggcagtataatttctttttttttttttgagatcatgaggcagagtctcgctctgtcgcacgatcttggctcactgcaaccaccaccttccaggttcaagtgattctcccacctcagcctcccaagtagctgggattataggcgcttgccgccacgcccggctaatttttgtatttttgtagagatgaggtttctccatgttggccaggctggtctcaaactcctgacctcaggtgattcgcccgcctcggcctcccaaagtgctaggattacaggtgtgagccaccgcacccggccatttcttcttttttttgagacggagtctcactctgttgcccactacaggcgtgtgctaccacacccagctaattttttgtatttttaatagagacggggtttcactgtgttagccaggatggtcttgatctcctgacctcgtgatccgcccgccttagcctcccaaaacgctgggagtacaggcatgagccaccgcgcctggcctgtatttttattttttggagacacagtcttgttccgttgctcaggctggagtgcaatggcgcaatctcagctcactgccacctctgtctcctgggctcaagcaattctcttgcctctgcctcccgagtagttgggattacaggcacccgtcaccatgccttgctaatttttgtggtatttttagtagagacagggttttaccatattggccaggctggtctcaaactcctgatctcaggtgatccacccacctcagcctcccaaagtgctgggagtacaggcgtgagccatcacacccagccgaatttttgtatttttagtagagatggagtttcaccatgttggccaggctggtcttgaactcctgacctcaagtgatctgccttcttggcatcccaacatggtataactcttgtaagcagggggaatccctacatggacattacaaattcaccacagccagagaacatcctaaactgacagtcgagacctcctttcactgcagcaggctccctaggccaagtgaattccctcatgcagagtacacacctctctgctaaaagtctaattctccctcactcctgatgcaaacggactgtggaacacaaaaccctaccctgatcaataaaaatctcccccaaacataatgtaagctcccatgggcaatgtgaacctctgtcccttatgagcctccccacagacattgtaatctctttcatatcgatgacaaagttaacacagacagggcacatctccatgcatggagaactctctgtggctgctgtgaaccccttttgtgatagcatgaagcactccccatggggctacctacaaaggcagtgtgcactctcttgagtgtaaatttcccccagattcagcatctacccaatgtgcacaatataaactgctttgtcaaacctccctcaactccgggtccacccaatatggaaggatgaattgtcttttaggattacattaacggctagatgcagcggcttatgcttatgatcccagcactttgagaggccaagatggaaggatggcttgaggctagaaattggagaccagcctggacaacatagtgagactccatctctacaaaaaaaaaaaaaaaattagcagggcatggtggtgcatgcctgtggtcccagctactcaggaggctgaggcaggaagattgcttgagcccaggcactcaaggttgcagtgagctatgatgctgctactgcactccagcctgggcgacagagtgagaccctgtctgaaaaaaataataataaaataaaaataaataaaattaggccgggagcagtggctcatgcctgtaatcccagcactttgagaggccgaggtgggcaggtcatgaggtcaggagttcgagaccagcctgaccaaaatggtgaatccccgtgtctactaaaaatacaaaaattaaccaggcatggtggcatgcgcctgtaatcccagctacttaggaagctaaggcaggagaatcgcttgaacccaggaggcacaggttgcagtgagccgagatcgcgccactgcactccagcctgggtgacagagcaagactccgtctcaaaaaaaaacaaatttaattaaaaataaataaataggccgggtgcagtggctcacacctgtaatcccagcactctgggaggccgaggcgtgcagatcacgaggtcaggggatcgagaccatcctggctaacacagtgaaacctcgtctctactaaaaatacaaaaaattagccgggcgcagtggcgggcgcctgtagtcccagctactcgggagcctgaggcgtgaacccgggaggcggagtgtgcagtgagccgagatcatgccactgcattccggcctgggcaacagagcgagactccatctcaaataaataaataaataaataaatacaattatattgcagtagtactagtagtatgatagtttaagattatataaataatgtaacagggccgggcgcagtggctcacgcctgtaatcccagtactttgggaggccgaagtgggtggatcatgaggtcaggagttcaagaccatcctgaccaacatggtgaaaccccgtgtgtactaaaaatacaaaaattagccgggtgtggtggtgtgtgcctgtaatcccagctactcaggaggcttagacaggagaaacacttgaacccaggaggcggaggttgcagtgagccgaggttgcgacattgcactccagtctgggcgacagagcaagactctgtttcggggaaaaaaataataataataataacaacagtgtaggttataagattccttccgagtgtgaactcctcgtggacagtgaatttcccccaatctcaacacaaataatttgtgaacagtgggactttctcatagatgtgaatatccttcatattccatgaaccccattggacaactaatatttcttctatgctatgaactagctctatgccctagcacattctttcacacgtagtttgagtgtttcatggacagtatgacttgcaatagactggatgcagtttcctcacaagtggtgtgaattccagtgtggaatctgaacctgtcacaggcaaaagaaagcctccctgcggccagcgtacccatattgcttcccattagcctcggaccagggcgaatacaaagtggagggcatagatgcattgcagacaggttcaccatctggttgtaaacccgtatctgggcagcaggcatctactacaaacagggcatctccctgtcctcctccactccagtgtgataccctcctacccctgggatctttaaaaatctgcctctgtcaggggcgtacacccacaaagtgtagctctccacgtaatgcagtgcgaagccccaagaagcgctgcatttcgtcatctcggccccctgccccaatgcctagtgggctgtcaaactgcgctgtcctaaatgtcaaactcttggaggaggtgacctgtcccccgggccccaggccgcgcgcgttgcctatactgcagcgcgcgacaccccacaagcgcgcgttctctcccctcccggtggcaacagggctttccgcggggccgcgccagacttttcgagaccgtcaattggtcgtagtcccggccacccggcagccaatcaacaaggggaaaggtgacatcactggttctcctcccctcccccaatccaaacttccctactccgtctaccggcagcaacaaccacgtgggggaggggtaagagagtagaaccggtgaggtcattgcaccgccccggccgctgctgattggctgcggggctcgcgggtggcggttggctgctccttgcacctccccctcgtgccgctaccgctgccactgagaggagccaccggcgacgccagagccaggaatacgggtgagtcggggccctgggtctaagatactcctggcgtccagtgagactcacgacgaactgcccttttcgactttttctcctcgccgggtttctttggtgctccaagcactctgtcacatgggagttgtagtctgccttgtactgtcggctatgggccgaagacgtgagaagactacggttcccagcaggaactgcgactagccggtcaacaaacgttcgggccacgccttctacctccgttcattggacaacccgtcccttagcccctcctcctttcatttcattggctactgtccctcacagaggctgggttccggcctaggctgcatggcgactgggtactgtatttgtcatttggaactaagacggcctgcaattggacacgactggtgtccttcacttgttgtagggtagggccctaggcagatcaggcagtcgtaggctcaggttggtgtcggtcccggagggaggccggtcttggactttggccccgccccctagcgctgcccgatgggcccaattggtcgccgcgagcgtcgctcgtcgtcgagaggcggagccgaccagtctgcggatatctattggtctaggctggcgccggtcagtggggttgtgatcgctgattggctggctgctccagctgttgcaggtccattcaccattttgtgtgttggagtaaaaaaaaaagggagaatcgagagggagagccggagggggggcggggagggaccggaccggaccgagccggggccacggccccccgccccgaaaccccgccgagcccaaggtgaggggcggggccagggctgacacaggaaaggggggtccggggggctgggggccgagaggggacaggtggcagggacggggagggggtacagggggaaaggggtgggcggaatggtgggaagggaggagggagtggaggaagtggtgggggtttgacagaaaaagggtaactgggggagggggtggtgggcaaagaagggtaacaggaatggaggggtgacaggactagatcagggtgacagggagagggaggggacagagttggagagtgtgacaaggagaggtgatggggagagaaggtgacaggtccggagatggctgacaggacagtgactgggaggaataggtgacagagataaatgggggtgacaaggagggggtgacaggagggggcctagggcattttaaccgagaggtagagatagaggtagtgacaggatgagagagagagtgtcagagaagctggtgccaggagggctaatgggaacagagggtatgagaccccaaagagccagggcctgggctggcctgggctccgggagttactactcagatctgaggaaggtgagggcccccggggcttgggtgggagttattcagacagggtggacaggaagagagtaggccctaggggaaagaaagcagctctggggcgaagagaggctgggccaggcagcaaggtctaggggtccaggcggcatagttgtaggccctgggtggggtatgcaaaggtttgtgcttggaaaaaactggagccagatctcagtccccaacatggtagtctagtgggtcagcgggtattaggtggtgatggctgcccaacttctgggcatttgggtgccagccccgggacgccctccaggctctgcctgtgaggaccccaggattggcccaagaaagggcaggcctgggactccagggtccacaggaggagcaggcccctagtgagagagcatgaggtcaagggtcccccagtagctggaagactgagtcggggttgcctctcattgtgtttggcttatggttctgggtcccccaaccctcctagaggcctctgttttggcctctcaggttctcttagtcacttcagagtaaagttttttccccttttcttttctcagggcagctcgaaagggggcgggcagtaatgactgttcaggaagtgggtgaggttggcctgttgggcttgtcctgctttctttgaccttatcccacctatccccacttggagttggagggcatatttgggggcctgcggggggctagccgactcagccaccctgccagagccagcccagccagggcggggatgcatgcaggcaagaagaggggggctgggcttgcgggtatcacgctgggtgctgtggggggaggagcaggctcccatccagtgggacagagaaaccctggggtgtagctctgtgtcccactgtgtgatgacgtgtgcgtgcttctgtgcgtgtgtgtgtgtttgtgcgcgtgcgtgtgctcatgcacggccccgtggcagtgctgggtatgagctcttgccccagacatgcccctgcctgctccctgccaggatctggggagatggctgtacctggcagccctagggtgcagagcagagtgggcagccgtccctcgggactctcagctgcccacttcttcccacagtgcctggccatgccaggctgcccagaggggcagagggagggtgggggggtggagaaaggctcatatcacagcccagtcaccaccctttttgtgacttggtacttgtgcatgtgtgtgtgtgtctgagtgcatgtactctctgcatggtgacagtgcgagtaaatgtgccctctggatcatgtgacaggcagcacactgaaatggtcaggagcacggactctggagccagagagcctgggttcagaccctagcactgctgtttcccacctggatgatcttggacaagttgtctcatctttttgtggctcagtttcctcaggtgtgaaatgaggccgatagtagcacctgcttttagggctgttgtgaggatgaaacaggttaataaaggcaagcttagcatggagttcaggacacagggagtgctccataggtgtgaactgttagtgcttttgatgtccccttggggcattcagagcatgtgctctgtgtcctttgcagagccagcaggtgtctgttccccaaggagccagagtgtgtatactcaggggactcaggtgctcacctgtgcctggtgctgactgaggtatcacatgagttgacagcagccagagaggaggccttggggatggtgggatggagacagtagactcagcaagtgggaaatcttagggtacactggctctggagaggttcctgagttgctccgcgtaatcctccgctctcccaccctgcaggtggacaaaaatgaagccaatgaagaaggcatgcactggcctttcaggtcctggcagtggcagcaagtcccccccagccaccagggccaaggctctgaggcggcgaggggctggggagggtgacaagccagaggaggaggatgacgaggcacagcagccgcaaccacagtccgggcccgaagaggctgaggaaggggaggaggaggaggctgagcggggccctggggctgaaggtcctccactggagctgcaccctggcgacccggctccaggcccagcagaggaccccaaaggggatggggaggcaggccgctgggagccctcactcagccgcaagacagccacgttcaagtctcgagcgcccaagaagaagtatgtggaggagcacggagctggcagcagtggggtggctggggcccctgaagagcgggtgcggacccctgaggaggccagtggcctgggggtgcctccacggccacccacctccactcgttcctcctccactgacacagccagcgagcactcggcggacctggaggatgagccggctgaggcttgtggtccaggcccttggccccctggcagcaccagtggcagctatgacctgcggcagctgcggtcccagcgggtgctggctcggcgtggtgatggccttttcctgccggctgtggtgcgccaggtgcgccgaagccaggacctgggcgtgcagttccctggtgaccgagccctgactttctatgagggggtgccaggcgctggtgtggatgtagttttggatgccacacccccaccaggtgccctggtggtgggcacagctgtctgtacctgtgtggagcccggcgtggctgcctaccgggaaggtgtggtggtggaggtggccaccaagccagctgcctacaaggtccgtctcagccctggccccagctcccagccaggcctaccaggcagcctcccgcagcccccacagccactgcaccgtgagccagaggaggctgtgtgggtggcccgctccagcctacgcctgctgcgccccccctgggaacctgagaccatgctgaggaagccccctacaggccctgaggaagagcaggcagagcctggggccaccctgccaccctgccctgctgccctggaccccaaacagcccgaggatgctgaggtctctaagatcagctttggtggcaacctgggtactcactgtgaggagggcgaggagaagcaccctccagccctgggtaccccagccctgctcccactgcccccaccccagctcctgtcaccaccacccaagtctccagcctttgtgggccccggccgccctggcgagcagccctcgccctgccaggaggggagccagggcggcagccgcagcagcagcgtggcctccctggaaaaggggacagcaccggcagcccgggcccgcacgccactgacagccgcccagcagaagtacaagaagggcgatgtggtctgcacacccagcggaatacgaaagaagttcaacggcaagcagtggcgccggctgtgctcacgagatggctgcatgaaggagtcacagcggcgaggctactgctcacgccacctgtccatgcgaaccaaagagatggaaggcctggcagacagtgggcctggcggggcgggccggcccgcggccgtggcagcccgtgagggcagcacggagtttgactggggtgatgagacgtcgagggacagtgaggccagcagtgtggcggctcgtggagactcacggccacgcctggtggcccctgctgacttgtcacgctttgagttcgacgagtgtgaggcggccgtgatgctggtgtcgctgggcagctcgcgctcaggcacgccctccttctcacccgtctccactcaatcgcccttctcgccagccccatcaccctcaccctcaccactcttcggcttccgccctgccaactttagccccatcaatgcctcaccagtcatccagcgcactgcagtccgcagtcgccacctgagcgccagcacccctaaggcaggcgtgctgacgccaccagacctgggcccccacccaccgccacctgccccccgagagcgccactcctctggaatcctacccaccttccagaccaacctgaccttcaccgtgcccatcagccctgggcgacggaagacagagctgttgccgcatccaggggccttgggggcccctggcgcagggggtggaggagccgccccagactttcccaagagtgacagcttagactctggtgtggactcagtgtcccacacacctacaccctccacgccggctggcttccgggccgtgtcccctgctgtgcccttctctcgctcccgccagccctcaccattgctgctgttgccaccccctgccggcctgacctcggatccagggccctctgtgcgcagggtgcctgctgtgcagcgggactcacctgttattgtccgcaaccctgatgtgccactgccctccaaattccctggggaggtgggcactgctggtgaggtgcgggctgggggacctgggcggggctgccgtgaaaccccagtgccccctggggtggccagtgggaagcctggcctgcccccacctctgccagcccccgtgcccatcaccgtgcctccagctgcaccaactgccgtggcccagccgatgcccgcctttggcctggcttcttcaccctttcagcctgtggccttccacccctcacctgctgccctgttgcccgttttggtgcccagcagctataccagccaccctgcccccaagaaggaagtcatcatgggccggcctggaacaggtaagaggtggaagtggatgggctgcgccaggctcacctcgtagagggcctcttgcaagctgaactcttgagaggtgagctcctcaccttgggagggcttcaaggggaggccggcctcctctctgcacagatgttgctgttggaattcacatgtcaggaaagggattggacttttaaggctcaaggcaccgtttccagaggcctcctgtcagagaacgtggtctcaagaggtctatcagtcagcaaacctttcttgagtgcagactgagtcaggtctccatggagctgatgggataagagaatgataattgtggcaacagcttccacatcttgggggactgggcgagggcattgccatggtaagcactgcgtgtaggtgagcttgccaaattttcacatccacctcatagagcacttaccacctgttctaaagacccttttcaaatattagctcattttatcttcacaaccaccctaacaggaaagtgctatgattatgcttctttagaggaaactaaggccagggtcataatttgtccagggttacatggctagtcaatcctggagcagccctcaaacccaggcaggctggcccgtgaccacgtggtcatagtgctggattacagatgggcagatggaggctctaacaggtccttcccaggaggtggcaggaccaggactggagccctcatctttaccactgtgtccagtaaacatcacaggcacggccatggaaggcagcgggggtgtgctgggcacttctccaggtgtgaatctagcctggctacactgaggacagggcgtgtaagccaggagttgaaggatgagtgggaacctgcaaccgtggggtggaagagcctcctgggaggagggcgatgggacagccccaaggccagaaggagcacagcctaggaggggaagagggaaggccagggtggctggagagctgaggctgggggtggaagagtggcatttctgagatggtgctgaacagccacggacccaggctaggctgggccttgtaggagcaacacagagagggtgacagacctgtcggaagctccttcctagcatttctttcttatttgtttatttatgtatatatttttttatttttatagagatggggtcttgctgtattgcccaggctggtctcgaattcctgggctcaagcagtcttcctgtcttggcctcccaaaatgctgggattacaggtgtgagccactgcacctggccttatttatttttatttatttattaatctactgttgattcagggcctggccctgtgctgtgcctggccctgtgctggatggtgctgaggacacagccctacttacacagggctcacagcctctggaaaagacagacccctccctagacagtaacagtctggggtggtcagggatggggtggaggaagccaggaggccgtgggagcccagagaagatgcctgtccagcctgagaagtcagagaaggcttcttggaagaagggccagatgcctatgaactgaaacctgaagggtgtgcagatgtgagcccggcagggtaggcaggaaggatcttcaggcagaggaaagagtttgtgcaaaggccttaaggcaaaagcagatatttgtaagatgttgaatctggaaagtcaaagactctaaatggcaggtgagtgttggggatgtgtggctggattggtgagcaagggtcagatcagagaggacccttaagtaagatcattatgaactgtatcctgagggtactagggagtcatggaaggttttgagcagattcaaccactgctgcaccatagagggtgtgtttgagtctctgaggccagaagcagggagaccagggaggaaggaggctgggtgtggatgtgggtaggagccgctgtggcttgggcttggggcaagagccctttcaggaaggagcactggcctggcccttcccttttggggctccagcccaggccagtcccgagggacagggcacagggacacgggttatgcctgcccctgatgttcatatacagaactgaggctgtgagctgtgtgtttcaccctgacaccaacattttttacatttgttgttataggtggtacaagcaaaatttcacagcagggatttctgtccttaggtaatgaagaaactaaatcagagggtctctaaccactcccctacccttcacccccccatatgcccacaacccccaacatggcccctacagcattgtctcatgtggccactcctgctgtgtggggaggaatggctctggtgcaggggatgctgaggcttaccagagtaggcccagcagggctcttgttaccattttccagatgaggaaaagtgaggccctgacaaatggagagtcttgattgaggccagccagccagtgaggggcaggatgagagctttgagtcatctcccaacctctagactgtgggactctcactaccaaaagtggcagtaataataactcaccgagcagcactggtgatgcacgtgcctggcacacttcaatgagtcctgctgagcctttactccctgaatcctcacaatgccccaggctagtaccatgattattagttccattggacagaggaggaaaccgtagcctgaaaggctaagtgacttgcccgggtcctccagctaggaagagagagagccaggattttgagacagagtctggctctgtcacccaggctgcagtgcagtagcgcaatcttggttcattgcaacctctgcctcctgggttcaagcgattctcccgcctcagcctcccgaatagctgggattacaggagtgtgccaccacgcccggctaatttttgtatttttagtagagccgaggtttcaccatgttggccaggctggtcttcaactcctgacctcaggtggtcctcctaccttggcctcccaaagtgctgggattacaggcttgggtcaccacaccgagctgtcaagagccaggatttgaactcagactgtgcggctccagatcccaggcccttaagcactttcaataataacaatgataacaataatacctactctactgagcgaagactgtgtgcctaaccccgggcttggggccgtttcatcagctccgcctgatgctgtgaagtagattgccaggcctgttgtccaggggtagactgaggatcagagaagggaggccccttgctgggggccacctggttgtcataacttgtccagtgcctatcctggcagttctgaggagcgcctccctaacaacacccatgctgaggtatccaggctgccttcaggttcctgaacagcctgccctttcattcttctcccagaggcctccctaagcccttgggaggtaggcagcttggagccttctccccatggggcccagatagggcagaccgtgttcagtggtatagtgaggttgcaggcctggtcccttctgctggcccatgccagggcctgaccctccatcagagggcagcaggtgtgagggggcggcccagggcagcctgcctgctcctgcccccagccaggcatttgcttccgctgggggacttgctggggcaggcggctggcattctccacattctgtgcatggcatggccagccagctgccgttgccacctccctctgaatcttcccgcctgctccccaggagaggatcccgccccagggcctgcagccccagtccaggaggccagatgtctcagccccattcctggtatggcctccctcccagctcccagcttcctgcctggcttccccttgttgacaggcgttgctccttctcctgggcctctgtctggcggtctggctctgtctgtcttatccttggcttcctatatctctctggtctcctatttctaggtctatacgtgtgtctctctttggacctctgtctgtctgactcttctttgagtctgggggctccctgtgccttcctgggtttgtccctctctggacttcagtcctcgtctgagctttcagcccaccctctttctgttttggctgccagctggcatcctgtgtctctgagccagccttggcctctctttggccctcctactcccactctttagatggacttgctgcccccatgccagcctcccagccccaccctgtgcatatcaggtgttctgttcttttaagacagtgggcagttgccaagcaccaggtctcctacttccttcttggggagtgttgggaggttgtccaggccagggagccccctcatgctctttgacaaattaactgcctactactgtccctgaaatctgctgagaagtgctgagatccatcctgcagacccatccaccatccaagcacctgttcccaagacaggcaggaaagcgggggctgtatggaccaagctaggagatccggctgtagggggcggcaggaaagaagcttcagtgcccacccacctgccagagggcatgacccaggtcatcctacctccccctttaccccttgcctttcatttgatgccagcttcattgaaaggagtcccagatatagtgcaccccaatgggtagggcctcagagacgaggcagtacccaccaactatgcttgggcaggtggggaaaaagaggggccaaaggggttaagcctgggtctcctgactccccagatccagatactgcccaccataatttccattttgtttcaaacagtgaaccctatctccaccagcagaagccagctccctcctcatccctctgccaggcccagggctgagcagtcctggggcaggtgggtgaggaaggcagatgtggatgcaggcacaggcaaggatgagcccagggaggtactgagtctggggaagccaaggggcagggacaactcagtggttcatgggggctgataagggaggatcaggtaggtttctcactggaggtgacatttgagctgaagtatgaggaatgagtagatttcagaatagtcaaagaaaggaaaaggcaattccacctgaaacagctgcatgagcaaagaccaggaagagtgaaagtgcatgaactccgagtggctagttgaggctggagctgacaccagagtccaggcttagcagaagggtgccgtggacgacaggcccagcttgaatgccaggctgagaagctggggctctacgcgggccagtaaagagtcaagaaggcatttagagcaggggagggaaaatgttggatctaggtgtcagagacccctggagaccgccctggaaaggcaggagttgggaagaagatggcttggggaagaggaggagaggaggaagagcttgtgaaggtgcaggagtgagtcttggtaactgtagaagagaccccagctcccccagcttagcagcccccagcaccaggagctgcgaggcgtcaggctgcctcctggcggcaggcggcggcgggacagcaggcgcgcgcatgcgcggcagagggggttggggggtacgtcccggagcccccggtgcccgggtattaatggctccattagtggccgggagggaggcgcattagcggcggcgacggcgtctggctcccattaccaccggcggcagcggctgcaccgcaggcggctggaccctagcccgccgcgccgcctcctccacccccaccctatcccctgttcccgctccccacgagggcccgggcagggaactcccgtccccctatttcagcggaaaagctgattgtgaagccagatagatttgggttcaaatcccggccgtgccacctcgcggctgcaagatgctatcccccctctgagcctgtttcttgcgaagtagtcggggaaaccgggtgctccgggggctgtgtagaagcggactggcacccagcgagggccgcgcccagcccccgctggcacctaggggtgtgggttcccgcgcgcccctgggtgcagacctcctgtgtcgggcctccgtccttctcattggctgccgtctcgcccgctgaccgctgattggccgagacctgcttctccgcccctgagcgattaacccctgcgctgccgcgtcctcgggctgggtggggtaccctccctcccaccgcagacagctcgggtgccagctggccggcgccccgccgcggcccgcgtgggtgtcaggccggccgggcacccgtccgccctccctgcacaaagcggctttgtggagcctgccgggggttggctgggggccaggcggcgagtggaaaatctcgtgagcgcggggaggggaggggaacgcagggcggcgccccctcctctgctcgggccttggcgcctccctcagcccgcgccgaccaaccctcccagcccaagcgcctgtacacccctttcccgcccccgcaccttcccttccccaaacccacgtctctcaacccccccacccccgcatcccacccatctcccaatccctggggaccatcccccacacactctccccagtctctcttttcctcctggtccccctgcctaccccagccccactcacactgactcaccccggcgctatttttagccccccatccttgccgagccgcgccagcccaatcctgggctcgttccccaggcaaccctggccgtcgccgacgccgcccggggtgggtgggtgggtgtgtatgtggaaagcgggtgaggggagctggggacaccggggtggtgagctgaggcggggacccgggcctggagagcagggtggggagccgcaggcggccggcaggggtgcggtgcctcgcgggctcaataaatgggccccatgagtttagagtgcgcgtctgcctgtccctcggtctgtcagcatccctggctgctcgccccaggcctctgggcaggcctcagcctgtaccgcccgcccgggtggctgttgatgtcttcgtctgggttccctgtccccaggcctgggtgtggtggcacagtgggggctgtttaggggcagtccttctgtggagttggttaggggttggtgcagggggtggctgccatcacagtcctgctcagtacctttttccaactagggaggccccaattagggttggggatggcaagagagtgggagctgtctagggataggacctgctccctcccctctgctcctaatccacccccacccagggttcctccaccctgaacaatagaagctaagtatagggctggcccagcgcccagggcaggggggcccttcccgcccggattcccgcccctccctgccaggctaggcccccacttggttgtaccctgccccggacggggcctcttcccatctctcctccgtgggcactgtgtattctaccagatgtgcacccctcccagatgtgtggggccctctttccctcctgtgccatgcctggctctttttctcaaccaacagaagtcggggatctggggggcagagctcctctgagctctgtccttggactgcattgcagtagagaaggggttaacttgccagtaggtgactcactcaccggtggggagaggagggggcagtggtaggggcagtggtggggagatagcaggccacattgatttcagcctcaattcgtgcctcacattgcagtccctggggcagtgaagtaatggagggtctgagtctggggctgcataggaaggagggggcagtcacctaatagtccctctggttgcccctccaggctcacagccaagtgtctggccctgcagtctctggaggtcagagggctacagaccttcccttcccttttgggctcaggttacccagtttttgccccctctccattccttcagctctgtcagtggatgaggcaggttggggaaagggctcgtctgctcctgttgaccatccaacctgtgtaagagcccagtcttggtccatctgagcctgtgcaacctttacgtgcccaagtgtgtgaccccagtcctgtgcctttactgggtatggctccagggcccctcttgggtgatccagggcctctgggtctctgccagatgggctccacatccttgcctgtgtctttgtgtgagcccccctcgcctttctgtggtccacgtggctctgtatcattgtctaactatattccccagcctctgtttggagttccctccctgggtccaccctgaggttaagccttgagtaatggaaacagcacttgagttagagctctgggctggtacatcttgactgcatgatcttgccacagtttattcaatctctgaggctcattttttcacctgaacaatgggtgtaataaagcatacctccctaggtggctgtgaggattcaatgaaccagataatacatacaagctcccagcacacagcagccccagtaagtgttagtttcctttcttcctggccctttttttctgggagggggggcggggttagtgggtggctggcagagcagtgtggtggggccagccatggtgtgctctgtggttccctgccttatactgctagacagagggtccagagtggccaatgagtgtcagggtgggtggctgaatgatggcggtggccactgagctctgtatacctgatgggcctgggtactgaagcaggtagcacccattagggtaggattatatagagggtggggtcggtatgatggtgtctgtgagagctgagtgtgcactggggataggaggcgctttgtgagtgctaggaaggctgtgtgtgtgacggaggagtgtgtggttgtgtgggaggggtgtggagtgtgtgtagtggacaagcagggctatgctgagttcctcctgtttgacatgttgtctgtttgcatgattcatgtgggctggtgggggtgtgatgaggatgcgggttggcgaagcatgtgtgacagggcatggatgagatgggtgatgtgaacaggatgggtgaatgcacgatggtgggtggggagcgatggaccgtgagcgtgtgaggttgtacatctgtgtgagcaggtatgtgaggtgtgacagcgtgggtgtaagacagagggcatatgtgcccgtggggtgtgtaggagataatgggtgtggcacgaaagtgtgtctgtatgtctgtgaggagtgtgagtgtgagtaggtgagggctcaggatgcctcgcccagccctacgcgcagtttgtctgcccagcggggccaggcgcgcccaggcgggtgtgcgggaggcgggccgagccgcgcgtgagcgtgttcctcgcgcggactggacacacaacagcaccacgcacaacccagagacctccgcagcgcggcgccccgaaccgcccccctggctcggtgcctttactgcagtgcgccctccctgccaccctcctaccgcggccccgcccccggccggctcggggccaaccggagcccgccccgccctgcccttatttgcatatgactgacgttcccccggggcggccaatgggggcgggcgcggcggggcctgacccgcgcgcggcggcggcagccaatgggctcacgcgcggggggccgggcttgcgcggaaggccgcgggggaagcggggaaggggcggggggaggcgcggcggggggaggggagcgcgtagtagtggcggggcggggaggcggtggtggttcggcgcggggctcgctcggagcgcacggacgcacgcacgctggtccgtctgcccgcccggggccggaggtcgacccggcgctgagcctcgggcccggggcccggaaaggcggggcggcggcgccggcagccgggacgcgcggggccagagccgttacccgccggagctgcgagggagggagggaacgagcgagccagcgagcggggaagggagggggccgcccccgcgcacgcgcgtcgcgccccgccccgcctgccccgcctgccccgcccgccggactccgcgagggaggagggagagggagggggcggtgccgatggcccccgtgccgcgcgccccgtgacggcccccgcgcgcgccggggggcggggcggggccggtgcgcgctgacctcccccgccccccgggcggcgggaggcaggcggcgctgtgcgcaggcgcgcccggcagagacccccgcgtggggcggccggaggggggcggcgggggggggggcatgcggcgacggcctcccgctccccccgggcccaagcggcgacggccgaggagcgggctgcgggcggagcggcgtcggccgctgaggaggtgcgagcccctgccgggtcccccctgcgccggaccatgtattcggcccacaggcccctgatgcccgcgtccagcgcggcctcccgtggcctcggcatgttcggtcagtagcgcctgggccctgggactgcaggggtcaaggtgtcggggtgctaagtgcggagtaacggtggtgggggtatagtaggggagagaacagtagaggcagagtaaagggatgacggggaaagttacggagctcggccgggccgagtggttagtgatggcaggtgggagtgtagcggagtggggcgtatctggggacagctgtgatgttaaagtgatgggatggcacaggtccgctgtaatagaaaggtgaggggtgcagagtaactggctctggagcatggggtagaataggaacagcacgagacctgctggtcctaggggaggaggcttggattgggtagtggggctaaggacagggctcaggaagcgagtgaggcactgttagctgagatcagagtgacaggctgcagtgtgtggtgtagtttgcagagagcgcgacacctaagaacctggagggttgtgcactggggaggggttcaggagggagcaggaccaaaggactgccctccattgtctgctgggtcccttttccccaccccccagaaaagaggaggccttgatgggaaagatctttgcaaagagaggcacaggtctaagtccctggaggcttttatatggggttggagggcccagcgggttttcaggggtaagggacagggtcatcgtagtcttgagtgctcttcagtgctgtcttcgtgatcccagtcccttgtttcctgaggtctactttttcctttgtcagcccctctcagaatcaggtctcgaggccagtgcctcgcacagagctcccccctgtccaggcttctgaaggcatggggaggtcacctcaggtcaggttgatccggatcaagggaaggcctggaatgatggagagcagggctagggcggttccctcctcccttcttcatcttccccgagcaggggcctctctcctctgctggttccacttcccccagggagccaggcagtgtgaggggaagcccactggtatcctaggcccgccccaaaagtccagccaggggtaggtcccagcctagggcttgctcttccaccacccacctcttggggctgaaggttggacccctgggaccagcctcttggtgaggaagcatcttcctgtgcatatcctcaaggaaacacctggcacttgtgccctctctgggtagagacttgttacaattctctcttctggcccattgtccgtggtttttcttccaaggagtttaccacaccctcccctgttttgggcaagggggctggaccctggactacagataagccgaggggctgatggggaagggaggctgggaggccgatttctggatggtgcattgtctttgtgggggcaaaggagagagctgctggagccacctgtgcccagccaggaagggcaggtctggcactctgtgtttgtggtgggggaggaaggcaaggagcaggacctctcccacaccacagttgtaagagaccccacagcctgtgcatagtgaacggagagttggaggggaggggacgtggggccgtatgcctcaggaaagggaaagagagcatgaggccaaggtgagacgctgtgttgggcggcgactgggctgctgggaatgtggcatgacgggggtgggggtcccagcccgtagaggtctggggccttgggagtgtgggatggcagccaagcatgacctggtttgtggcaggagcaaatcgttcctctggcctggtccctggtggcagggctggtggagattggtggggggaggagtggggcgtgagtactatttcccttccctgcttctgttttcttttttataaatctagaaacctttcagggaggagtttttcctgagtgacgttgcatggacgagtccaagaggctctggtgttgggggtggggggtagacaaaaggggtggggctacctcatctagggtggggaagagcttgagttggggttggggccaggctctcctgctgcacagctcacctggctcctttccacagtgtggacgaatgtggaacctcgctctgtggctgtgttcccttggcactccttagtccccttcctggcacccagccagcctgacccctccgtgcagccgagcgaggcccagcaacctgccagccacccagtggcctccaaccagagcaaaggtgagggctggtggggactggggggaggcaagggtgtggggtccaggtggcctaggagccctctgatctacctctgtgtccccagaacctgctgagtcggcagctgttgctcatgaacggccaccaggtgggacagggagtgctgaccctgagcggccccctggagccacatgccctgagagcccaggacccggacccccacaccctttgggggtggtggaatctggtaagggtccgcctcccaccacggaggaggaggcctccggccccccaggagagccccggctggacagtgagacagagagtgaccatgatgatgcgtgagttccctgaggcctgggacttgggggtgggatggccagagacatggccctcactgtccctgctgccccgccgcagcttcctctccatcatgtctcctgagatccagttgcctctaccgcccggaaaacgtcggacccagtccctcagtgccctacccaaggaacgggactcatcttctgagaaggatggacgcagccccaacaaggtactttatccctgcctgtcctgtgctcaccccgtggccacccacacctgtctgccaggtcctaactgtcccgctctgggctgtgtttaatgcagcgggagaaggaccacatccggcggcccatgaatgccttcatgatcttcagcaagcggcaccgggccctggtccaccagcgtcatcccaaccaggacaaccggaccgtcagcaagatcctgggcgagtggtggtatgccctggggcccaaggagaagcagaagtaccacgacctggccttccaggtaacgctgttgcctcttggctcctcccagcttcttctggtggggtgggtgagtgaagggttgccctgccctctcctgccaggtgaaggaggcccacttcaaggcccacccagattggaagtggtgcaacaaggaccgaaagaagtccagctcagaggccaagcccacgagcctggggctggcaggagggcacaaggagacgcgggagcggagcatgtcggagacgggcactgctgctgcccctgggggttagtcagccccttggctctcccaccctgccacctccctccccgagagccaccagctacccccttgcttgctcctcccctgccccagcagctcctctctgctctatcgctttaatttggcgacccttatccgtaaaggaaccggcagttgattcatgtgacggagccagggagatccacacagatactaagattcccaaacagcaatctcgttatcaactgttgtttaacgagtgtttactatgtgcctggcactacagggaatataagctgtagtctgcaaaaccccattctatttctagaagaagaaactgaggttcagagaggcaaaatcacttgcttaaagtcataaacaagcaaatgacagagccagaatgtaaaccccagttcggcgggcccccagcaccatagttggggccactgcagctcgcaaacacccctgatgggctgcttccacttattgaggttgtctggtgtgcctggcggtgttctggggcacatttttggagtgagcctatgggtatggcagttctgtgaggttagatggatagttgctatggatatgcacttctatgagagtggggacactagttacttcctctttgagatgagggaaccgaggctcaggccagcggttggctagccagcaccacatgaacctctctccaggcctccttactttcaggagggctgccccccagggaatgggcctgctgcaaccccagagggcaggaatcagcaggaatgagatgctggactggtggtgggtggtggtttttttttttcaccaagtggcccagaaattccagcctgcttctgcctagtacctagaaatatctatgggttgttgggccagtctaggtgctggtgacaggcttactgactgtcatagcgccactctctactttacagtgtcctctgagctcctgtccgttgcagcccagacactcctgagctcagacaccaaggctccggggagcagctcctgtggggcagaacggctacacacagttgggggacctggctcagcccggccccgagctttctcccacagcggggtacacagcctggacggcggagaagtagacagtcaggcgctacaggaactgacgcaggtctagggtgcaggccccctagtgggggtgggcagggaacctgtccagggcagcagccccgctgaaccctctctgccacctatcctgcagatggtgtctggccctgcatcgtactctggcccaaagccttctacccagtatggagctccaggaccctttgcagcccctggtgagggaggtgccttggcggccactgggcggcccccgctgctgcccacccgagcttctcgttctcagcgtgcggccagtgaggacatgacgagtgatgaggagcgcatggtcatctgtgaggaggaaggggatgatgatgtcattggtgagcattgcagggcccagaatcttgcccaggacccagcaggccaaggctcagagggtgggcagaacttggatccaggcccctaggcccctttgttttcttttccacttggtttatggttgcatgtggccagttcaggccctgccgagtaaatccagccctgccctcaggaagcccccagccctgcaggaaatctggaggacagggggcatgaccagatcttcaggtgcagtgttaggggctctgtcctgcaggctcataggctcctgcactgggcagtgggcactgggcatgtgggcacagccctgggctgaggagtagccttcctggacagcactccctgccggtttggagcagagctgagatccaggctccagactgtttctcctgggtccccctgcatctagccccctccccatactgttccctccactccctcagctgacgatggcttcggcaccactgacattgatctcaagtgcaaggagcgggtgaccgacagcgagagtggggacagctctggggaggacccagagggcaacaaggtgagggcttgggtcacggtgctgtcccatcacactccctcctaagccatgggaatgtctgtttctcccgggcttgagagagggggagattaaggtccagagagggcaagctgcttgccccgtggggagttgggtcatagtcaggatgaattgaggccttcagctggcaggggtgcagccctaggctggcctggctgacaggctggatgggcatggctagggggctgctatcgaggtgtcggagtgtcctgacctggggtgtctcccttcctttcatgcagggctttggtcggaaggtgttttcacctgtgatccgttcctcctttacccactgccgccccccactggaccctgagcccccagggcccccggatcctcctgtagcctttggcaaaggctatggttccgccccatcctcctctgcgtcctcgcctgcttcctcctcagcctcggcagccacctccttctcactgggctcaggaaccttcaaggcccaggagtctggtcagggcagcacagcgggccccctacggcccccaccccctggggctgggggtccagcgacaccttccaaggcaacccggttcctcccaatggatcctgccaccttccggcgcaagagacccgaaagtgtgggtggcctggagccaccaggcccctcagtcatcgcggcccctcccagcggaggaggaaacatcctgcagacactggtgctgcccccaaacaaggaggagcaagagggcggcggagccagagtgccctccgcccccgccccatcactggcctatggggccccagcagctcccctgtcccgtcctgccgccaccatggtcaccaatgtggtgcggcctgtcagcagcactcctgtgcccatcgcctctaagcccttccccacctctggccgggctgaggcgtctccaaatgacacagcaggtgccaggactgaaatgggcactgggtctcgggtgcctgggggctccccgctgggtgtcagcttagtgtattcggacaagaagtcggcagcagccacctcaccagccccacacttggtggctggacccctgctgggcactgtggggaaggcgcctgccactgtcactaacctactggtgggcaccccggggtatggggcccctgcgccccctgctgtccagttcattgcccagggggcccctggtggtgggaccactgcgggctcaggagcaggtgctgggagtggccccaatgggccagtacccctgggcatcctgcaaccaggtgccctgggcaaggctgggggaatcacccaggtacagtacatcctgcccacgctgccccagcagcttcaggtggcacctgccccagcaccagcccctgggaccaaggcagcggctcccagcggccctgcacccaccaccagcatccgtttcaccctcccaccgggcacttccaccaacggcaaagtcctggctgccactgcacccactcctggcatccccatcctgcagtctgtaccctccgccccaccccccaaaggtgagacctgggccgggcagcactaggggaggggccatagtcctgtttggctcccttgtaaccttttcctttcttgcctcttaacttccagcccagtcagtttctcccgtgcaggccccgcccccgggtggctcagcccagctgctgcctgggaaggtcctagtgcctctggccgcccctagcatgtcagtgcggggtggaggggccggccagccactgccactggtgagcccgcccttctcagtacctgtgcagaatggtgcccagccccccagcaaggtgagggcctgcctttctctctacctgctggatgttggcccctgtaccccatcatttctttgtcttttttttcagtcttttctccttctccatgtatctggttctctgtcttgccatcttccgtgatgtctctgtgcatcctgactctctcaagtcctcagtgtctgtaccctcctccttctctgtgtccccacctctcactgtcatcttgcccatcctgttctcaccccaagttctgtgttccttgcttttgcttagagtcccacttgaggtcttggtcttcccctgccccagtctggggccacagctcaccctggcctatgggtgcccttctccacagatcatccagctgaccccggtgcctgtgagcacacccagcggcctggtgccgcccctgagcccagccacactccctggacccacctctcagcctcagaaggtcctgttgccctcctccaccaggtaattgcagctgagcccatactcagaggccagggaaggggtggggcggggccggcttacctcactcctccccatttcctctcctgcggcagaatcacctatgtgcagtcagcgggcgggcacgcgctgcccctgggtaccagccctgcgtccagccaggctggaacagtcacctcgtacgggcccacgagctctgtagctctaggcttcacctcgctggggcccagcggccccgccttcgtgcagcccctgctctcaggtgaggggcggcctggcaggcagtgctggggacccagggtggggctgaggcagtccgggccctaacttggtctcctgcttcttcttctctgtctttcagcaggccaagccccactgctggctcccggtcaggtgggcgtgtcacctgtgcccagtccccagctgccgcctgcctgtgcagcccccggaggtcctgtcataacagcattttactctggcagccctgcacccacctcctcagcacccctggcccagccatcccaggcccccccaagcctggtctacactgtggccaccagcacaaccccacctgcagccaccattctgcccaagggcccgccagcccctgccactgccaccccagccccgactagccctttccccagcgccacaggtaggtgtcagatcaacccagagcagagtgagttgggggacccaggggatgggctccagtcaggcctggctcagcaaacaattttctccccactagcaggttccatgacctacagcttagtggcccccaaggcccagcggcccagcccgaaggccccccagaaagtgaaggcagccatcgccagcattcccgtggggtcctttgaggcaggtgcctctgggcggcctggccctgcaccccggcagcctctggagcctggcccagtccgagagccaactgccccagagtctgagcttgaggggcagcccacaccaccagcccctccacccctgccagagacctggactcccacggcccggagcagccccccactgcccccacctgctgaggagcggaccagcgccaagggccctgagaccatggtgagcgcctgcaggccgtggggctcccactgccacttggctgtgcctctccattgacgtctttgcttttctgtcctactcttctttccatgcctgtgtgtctctcaggttaaagggtcccctctgtcccttctgcctgcctgtgttgtctcctctcccatctgaggcccctgtcttggccttcctgaggccgtgtgacagccttctcaaggggtctgctgggcgggctcagatccaactctttgtttctggcctttgccccagagtctgagctcagtgttcgccatctccctgcccatctccaccccaggccagcaaattccccagctcatcttcagactggcgcgtccctgggcagggcctggagaatcgtggggagcctcccactcctcccagcccggccccagctccagctgtagcccctggtggcagcagcgagagcagcagtgggcgggcagccggggacaccccggagcgcaaggaggcggctggtactggcaagaaggtgaaggtgcggcccccgcccctgaagaagacctttgactctgtggacaagtgagcatgggctggggccttggtggagcgtgttagggtggcgggagtgggagcagctgcaggctgaggcgggggaggtgaccctgccggccctccagcagggtcctgtcagaagtggacttcgaagagcgctttgctgagttgcctgagtttcggcctgaggaggtgctgccctcccccaccctgcagtctctggccacctcaccccgggccatcctgggctcttaccgcaagaagaggaagaactccacgggtaggcgagcattgggcacccagggtccttaggtggagggcagactggggccacctgcactgagtctgcttctgtttggccagacctggattcagcacccgaggaccccacctcgcccaagcgcaagatgagaagacgctccagctgcagctcggagcccaacacccccaagagtgccaagtgcgagggggacatcttcacctttgaccgtacaggtgccgtggtgggcagaactttgggggcctggggacctgcaagaggagtgggtctctggaaggcggttagagagtgagagaggtagggtgggtccatccaggctgggaggaagcacagcctgtcagtggtgggttctggagtctggcaggcccctaggttgccctgtgactgtgggcaggacccctctctgactcccctgtgaaatagaatgcagtgagggcttgggtgggcactcagacggtggcaggaaggccctgccgctgctgcagccttgccatgctgcctgtgccctgcacaggtacagaagccgaggacgtgcttggggagctagagtatgacaaggtgccatactcctccctgcggcgcaccctggaccagcgccgggccctggtcatgcagctctttcaggaccatggcttcttcccgtcaggtgagcctgtctcggagtcttggggtcactcgggtgggacttatctgtacatctcatcctgtgctccccaccgtttttctatctccagcccaggccacagccgccttccaggcccgctatgcagacatctttccctccaaggtttgtctgcagttgaagatccgtgaggtgcgccagaagatcatgcaggctgccactcccacggagcagccccctggagctgaggctcctctccctgtaccgccccccactggcaccgctgctgcccctgcccccactcccagccccgcagggggccctgaccccacctcacccagctcggactctggcacggcccaggctgccccgccactgcctccacccccagagtcggggcctggacagcctggctgggagggggctccccagccctcccccccacccccaggtccctccacagctgccacaggcaggtgagggacccctgagaagatgccaggacttatagtaccccctcaggacatggacagtatgtgggggcaggaaggttatctcctcccgggtaaagccatttcgtcctctccagtttggggcggaatgaggcctgctcctcttgtaaatacccccttccctcgaagctccctcccggtgctggggggcagctgaggggctgcaggggcagtctccctcctccaagcccctgtacataacctggagcgtgtgaccttcagagcttttcactttatgcaaaatggctcctgtgagggctgcaagctggagggtggtgcaggccttgggccacagggaggcgcctgtggaatagggggagttcatgcaccccttttttccccagaggggctggactcaggttagtttgggggtgggggctcctgcactttgccacaggcacggggagggttttctcctcaccccctctgccctcccaacttgggttgtactttctaagaaggtgattccccctgcccttgcccccttccccagaacaaaacatgttgatcatgtgcaatatttcttactgtgccgagaagccgcaatgagcgagattaaagctgtttaacacacctgtgtggctgtaggctcttaacagggagggctgttggttgtaccagtcctgtcctgagttgtcatggagcggtaggctttccatgaggtgggggcaacaattccagtaccactgcccccaacttcagaggaaccccataggccaggtccctgacttgctgtggaccagatggcccctctccagtttaggagcctgtgcgctccgggagcctcaatgcctgctggccctgttctcagccattggactgcgtgagtttggggaaggcctgaggcaagatgccactggatggtttaccctcactggctctggggtcattcgtactcaggaaacaggtcccaagaggtcctagcccagaggtggcagtgggtgggagggagcctagtctacctggaatacccttggtcctcagtgtgacccctgctgcccccatgtggcctgggcctgcactgcaactgggcttgaaggaacctcccctgggtgacacccctcctgctcagcatgtggacacagtgcccacctgaggtgacaagatacctacaccctgtgtggagggatgacaactaggagtgggagggtcaggacacctccacagaagtggcatctaagctagagatggagcaccaggaagttccagccagggcaaccgcatatgcactgggtcactatgttcccagaattcttgcctgagcttggtcctgtaggatagtgctggaaagctggtcttaactagtgtttactgattggtaacgcctgcctgaagcacactattgtgatagtggaaattaacctaaccacaagaatcacagtgccttaatggatcagtgatacctgccctgggcagaaatagaaccacagccaggcatggtggctcatgtctgtaatgccagcaccctgggaggccgaggcaggtggattgcttgagctcaggagtcagatcagcctgggcaacatggcaaaaccacttctctacaaaaaatacaataagctggacctagtggcacatgcttatagtagcagctattcaggaggctgaggtgggtggatcacttgagcctgggaggttgaagttgcagtgggctgtggtctcaccactgtactctagcctgggtgacggagagagaccctgtctcacacaaaaaacaccttgcagaactgcagggtcacagatcaggataaggactaatggtggtacccagatacccagacaggttcgaccataaagcaggaaacagcacactgaggaaggagagtttaatgttgtgggaaggcagcaggatgcttagggtgcgggctccagcaggggagcaccttggccctggtcttgggccagcagacgcagaagcagggagtgcagagcccggcaaacaggtgtgtagcccaggcggctcagatgcaggtaatcatacatgtcatgatggctgatggtgccatctgagtgcacaaagccagggtcggcatctaggaagtgggcccgagggtggccagccagtgccgcccgtaccagctcgttcacctgtcggttcttctcccgaagtgggttgggatgttggcctcgcggaagcaggccctgagcaggaacacgaggcgtagtaaggaaacaagcatttgagtatcttgttctctgtgccaacctgtcctccacccaccaccatgaagtttccagctgcagaaaacactagggatgggcaagtggggagggtgggagggtagttcctaaatatcacatcctagccctcatttagcaagagacttctgggttttaccctctttcgttttcttttttttttttttttgagacagagtcttgctctgtcgcccagactggagtgcagtggcgcgatctcgactcactgcaagctccgcctcccaggttcacgccattctcctgcctcagcctcccaagtagctgggactacgggcacccaccatcatgcccggctaattttttgtatttttattagagacggggtttcaccgtgttagccaggatggtctcgatctcctgacttcatgatccgcccgcctcggcctcccaaagtgctgggattacaggcgtgagccaccatgcgcggcctagcctctttccaagtatcacttagaaaaatgttgacattggctaggttcagtggctcacgcctgtaatcccagcatgatgggaggcagagctggataggtcgcttgagcccaggagttcgagaccaacctgggcaacatggtgaaaccccatctctaacaaaaatacacaaaaattagtgggacatgatggcgtgtgcctgtagtcccagctactcgggaggctgacgtgggagaatcacttgagccctggaagcagaagttgcagtgagctgagatcatgccaccgcactccagcctgggcaacagagccagatcctgtctcaaaaaataaataggccaagggaggttgctcacgcctgtaatcccagcactttgggaggctgagacgggtggatcacttgaggtcaggagtttgaggccagcccggccaacatggtgaaatgccatctctactaaaaatacaaaaattagccaggtgtggtggcacgcgcctgcagtctcagctactgtgaaggctgaggcaggagaatcacttgaacccaggaggaggaggttgcagtgaggccagattgcgtcactgcactctggcctggcaacagagcaagactctgtcccaaaataaataaataaataaaagatatcaacatcatggctcatgccaagggatcaatccgttttcagaagaggaaatatcctagctacctacaagtgatggagcctagatttaccccaggaatgcctgacaacttttggcctattcaaggttttttgagggtttttcttttgttttctggtgagacagggtctctgtcacccgggcgagagtgcagtagcatgatcacagctcactgttaccttgaattcctgggctcaagtgatccttctcctttagcctcccaagtagctggggttacaggttttgcgcaccatcatacccagctaattctttttttttttgagatggagtcttgctctgttgcccaggctggagtgcagtggcacaatctcggctcactgcaagctccgccccccgggttcatgccattctcctgcctcagcctcccaagtagctgggactacagacgcctgccaccacgcccggctaattttttgtatttttagtagaaacggggtttcaccttgttagccaggatggtctcgatctcctgactttgtgatccaccctcttcagcctcccaaagtgctgggattacaagtttacaggcgtgagccaccgcacccggcttttttttttttttgagacagagtttcgctcctgttgcccaggctggagtgcaatggtgcaatcttggctcaccccaacctccacctcctgggttcaagcgattctcctgccttagcctcccaagtagctgggattataggcatgtgccaccacgcccagctaattttgtatttttagtagagatggagtttctccacgtgtggtcaggctggtcttgaactcccgacctcaggtgatctgcttgcctcggcctcccaaagtgctgggattacaggcatgagccactgcgcccagcccatgcccaactaatttttttttttttgagacggagtctcgctctgtcgcccaggctggagtgcagtggcacagtatcagcttactgcaagctccgcctcccaggttcatgccattctcctgcctcagcctgccaagttagctgggactacaggtgcccgccaccacgcccggctaatttttttttgtatttttagtagaaatggggtttcaccgtgttagccaggatggtcttgatctcctgacctcgtgatccacctgcctcggtctcccaaagtgctgggattacaggcgtgagccaccgtgcctggcccgttttttagtttttcaatacccccaaagtcttaagccatccctgggcaaaaaaggctaattggtctcggagcatattctcaaccacagccactctgaagggtatagcaagctccaacgtgagattctgcctaaaagccactgctctatgtcaagctgcctagaactgtgccaactgtggctatatctgagggggtcccagaccactgccattcttcctttcccactctcccagcctctcaccagcaccacaacccgggcctggggctgtcgctcattcaccagttgcacaatggccttgatgccaccagtcacctgctctgctgtgtgtccgtggttgttggtgcccacccagaccaccacaatctgtggaaaaagagacatgaagcagcggtgagggggcagccaaaagatgttttagagccccacccaagccccgctcaccttgggccggatgtgttccagctccccattctccagccgccacagtacatgctgtgtgccgtcaccaccaatgccaaagttaagtgcatgcagaggagagaagagctcgcgccagatctgtgggcaagaagtggtgtgggcaagaagtggtaggggcacaagggcactgtccgcatggaccatccccctctgtccaggtgttaaccaaatgccattatggaagaaccttacttcatggaagcagtcttaaaattttacctggagcaaactccagcatggctgaacctcactttatagaaatctattagagtctctcacttattttattttattttatatttttgagacagagttattttatttttgagacagagtctcactctgtcacccaggctggagtgcactggcactatctcggctcactgcaacctccgcctccctagttcaagtgattctcatgtctcagcctcctgagtagctgggactacaggtgtacgccaccacgtccagctaattttttgtatttttagtagagatggggtttcaccatgtgggccagactggtctcgaactcctgacctcaggtgatccacctgcctcggcctcccaaagtggtgggattacaggcgtgagcccatggtgcccagcctatttattttttgagacggagttttgctcttgttgcccaggctggagtgcagtagtgcgatctcggctcattgcaatctctgcttcccaggttctggcgattctcctgcctcagcctgccaagtagctgggactataggcatgtgccaccatgcccagctaatttttgtatttttagtagagacaggatttcgccatgttggccagggtggtctcgaactcctggcctcaggtcatccgcctgccttggcctcccaaagtgctgggattacaggcgtaagccaccacaccctgcctagagtctctcactttaaaccaagccccaggctctgttgctcatgctgaggtgggcggactgcttgagcccaggagttcaagaccaacctgcgcaacagggcaaaaccccatctctacaaaaattacaaaaattagccaggtgcatggtgatgtgcacctgtagtcccagctactcggagactaaggtgggaggatcacttgagcccaggaggcagaggttgcagtgaacagagatcataccactgcacgccagcctgggtgacagagcaagaccctgtctcaaaaaccaaccaaccaaccaaccaaccaacaaaacaaaccaagccccatagaagcaagactcacttcatgaaaatccagtctgcttgagccatgcattgaatcaatggcattacagttgaaacttattttgatgaaacccattacagttggacatgctttgtggaaagatattattatgattgagtcctctttgtggagtgccattagagttgcccttcgcttcctgtaaagtgactatagctttgtgtaaacccaacagggctgcgcactacttaaagcaaacaagaaagagcctcactttaggcaagcctatggcaggaaagcctcattttaggtcttagtacattatacacaaatccaatctgataaaaccaaggcatacatttctttctcaatagaatgttgcaccttacaccaagattctcagagcctcgggctgcctgaggccaatctgggtactctcataatacctcacctggcctgggttctggtccagatgtgtcagcatggacacagggctggatggggcagggggagagggactgccctcacctcgcactggtgcatgagctggaccaaggagtccccgatgaagacgacttcgggttccttatctttgctgtcagccacgaaccgatggtgctgcgggagcgcgcgagagggagtcaatggcatgcacgctccagggcccgccccgccctgctcccttaggcagcgcctcctcaactgccctcagtttcccaatcaggtagtgagagtggcacgaaccagccgttctcctgagccaccccccgcgcccccggactcctcaatatcccaggtgggaacgctcaccagggacatccagcgcccgtcgccctgtacgtcctgcaccggcgtgggcttgctggctgggttctcctctccactcatcttggcgccgcagctcctgcaggatgagcgagtcgggtcggcccgggagtgttccgaacggagctggctccgccacgcccactcctacccctcgcggcaacaaaggaccgtcccaacgctagcacacccgcggaggacgaaggccgatacagggcgccgcctcctctccagggacggaagccttcacttaggaggtaggtggaatcaggaaccttcgcttcccccacgacggccgcacagtgggctcgcccggcgcttcccgctcgggccgctgactcccaggccgcgcacccggcacggggtggggggagggagaggcgagaccatccagctcccgaggcggggaggagggagaaaccacccaccggtcacggggaggggcgaactacctgaagagtcgagagtgggcggggaaaatctagccctctgtctagcaaatgggaagaaaccatttgctgtacagagtgaaatgtgcggaagggaccacctactgttgcgggggggggggtgacccattcacgtggtggggggaggggagcgagtggacgagtccattcttatattcccttgaaggggtggctcgaatgcacctggctgggggggacgctcctattttctactgatgtgggggacagaaaaggaagatgacaaaatgtgaaaattcgaggctcccttctaaggagccactctaaggccgcgccagggctttagtgagcctatctactcgtgggcttcccctactcaaaacaccgtgggtgtgtgtgtgtgtgtgtgtgtgtgtgtgtgtgtgtgtgtgttgaaatctaaagtacatatctttgcattcaagacatcacaggacccctactcaaaacaccgtgtgtgtgtgcgcgcgcgtggcataacatataaactacatatctttgcattcaagacaccataggacctgcttggagggtagaagaaggtgcagaaagagaaaggaaattagagacgcctccagggctcaggtccagtctggcgtccctccggcagatcatcttgcagatctgcagcctctacactctctctaaacccacaggccaactgggtatgtctgagctctgaaacctacatccatagccaaggccacctagggtcgcgcctctcccccaacgctgccccaaattaatctcagacctcagtgtcttctcagatctccctcttctctgggaccaggtggggggctcactccctgctaaacgtcctggtcatgttcttgtagcctcactccaggtgggaccttcccatgtattcattccttcgaggtggattgatactgagacagagatgagtgttattcattgtgtttatgttttcaatccactttcctggaactgggccgggcacacagtggttattccacaagtgcttgctgaatgagtagtaaatgagtgggtcagctcctgaccttgtcccaatgtgtttagggagacagatccagacacagaggtgtaggggtgtcaaagttgtgtttgagggagagacagggacctctggggaggaagaggagaaggactctgaggactatgggtttcctaggagtagtatctcagctgggtctgaaagataatgaagaatgggcaagcagaaagaaaagacacaggtaatcactttcttattaggtttggggaatatcgtggaatagcttgattttaaagtctgagggaggccagcatggaggctcatgcctgtaatcccagcactttgggaggctgacatggtcggatcacttgaggtcaaccagcctggccaacatggcgaaaccacgtgtctactaaatatacaaaaaaaaaaaaaaaattagctaggcatggcagcacacgcccgtagtcccagctacttgggaaggctgaggcaggacaattgcttgagtctgggaggcagaggttgcagtgagctgagatcgcgccactgcagcccagcctgggcaacagtggcccagcttgggtgacacagcgagactctgtcttaattacaaaaataaacaaacaaataaagtctgagggagccaggtgcagtgatgcatgcctgtagtcccagctactggggaggctgaggtgcgaggatcgcttgaacccagaagtttgagaccagcctgggtaacacagtgagaccctgtctaaaaaaaaaaaaaaaaaaaggctgggcgcggtggctcacgcctgtaatcccagcactttgggaggccgaggtgggcagatcacgaggtcaggatcgagaccatcctggctaacacggtgaaaccccgtctctactaaaaatacaaaaaattagcggggcgtggtggcaggcgcctgttgtcccagctacttgggaggctgaggcaggagaatagcgtgaacctgggaggcagagcttgcagtgagccgagatggcaccagtgcacttcagcctgggagacagagcgagacgccgtctcaaaaaaaaaaaaaaaaaaaaaaagggcaagtgcctgtagtcccagttagttgggaggctgaggcaggaggatagcttgagcctgggagatgaggtggcagtggcccatgatggtgtcactgcactccaggttgggtgacagagtgagtccctgtctccaaaaaagaagtcataatcagctaggcacggtggctcactcctataatcccagcactttgggaggctgaggtgggcagatcacttggcgtcaggagttcaagaccagtctgaccaacatagcaaaaccccatctctattaaaaaatacaaagattagctgggcaaggtggtctgcgcctgtagtcccagctacctgggaggctgaggcaggagaatcgcttgaacccgggaggtggaggttgcagtgagttcagactgtgccactgcactccagcctcagtgacagatttaaattccatctcaaaaagaaaaggaaagaaaagaaaagaaaagaaaaaagtcttaattatgccttcaagtcagtgatataagagagaattttttttttttttgatagagtctcgctctgtcgcctaggctggactgcaatggcgcgatctcggctcactgcaacctctgcctcccaggttcaagcgattctcctgcctcagcctcctgagtagctgggactacaggcgtgtgccaccacgcccggctaattttttgtatttttaatagagaagaggtttcactgtgttagccaggatggtctcgatctcctgacctcgtgatctacctgccttggcctcccaaagtgctgggattacaggcgtgagccaccatacccaaccgagaaaaaaatttttaaaaataaagtcttagaggataagttggagcagttcctgaagcaaagcttagtgagaaacaaagcttccaggcattcttcattcaccaggcccatttcaagttagacatattggtctagtttatccttctagcaaccaaatgaggaaggtagttttattaccaacccaattttacaggtcagaaaactaagtctgaccagttacaaacatttccaaggtcacacagcccagttgtgccattttgggcatttaaaccaagcctagctatgaatcacaacactacactaacttttttttgagatggagtctttctctgtcacccaggctggaatgcagtggtgtgatctcggctcactgcatcctccacttcccaggttcaagcaattctcctgccccagcctgctgagtcgctgaatatacagtcgtgagccaatgcatgtggcctaatttttgttcttttacagggtcttgccgtctccctcaggcgggcgtgatcatggctcactgctgcctccacctcctaggcttaagtgatcctcctgcatcagcctcccaagtagctgggcccacaggcaagagccactgcgcccagcttatttatttatttagagacggagtctcgctctgtcgcccaggctgaaatgcatctcggctcactgcaagctccgcctcccgggttcacgccattctcctgcctcagcctcccgagtagttaggactacaggcgcccgccaccacgcccggctaattttttgtatttttagtagagacggggtttcaccgtgttagccaggatggtcttgatctcctgacctcgtgatccgcccacctcggcctcccaaagtgctgggattacaggcgtgagccaccacgcccaaagctaatttattttttgtagtcagggtctccctatgttgtccagggtggtcttgaactcttgggctcaagccagcctcctgcctctgcctcccaaagtgctgggattacagacgtgagccaccacgcccggccaactgtataagttttctagggattatgtctgtggctgcttgggggacagctgtgcatgggggctaccatgacccttcttccctttggcacgcctggtctcaactagccctcgaaagaccgctgatagctatctgaaccaatcagcattcaggaagggggcggacctagtgaacctcacagccaattgagggctgggaggtgctgagaccaagaaagggagatttctgaaattgaggctgggaggggaggggctataaccggcgcttccctggcacgcgccgctaggtttccgtcctctcagagccacgaagccaaagggcatggaaagggcacgcgcatgcgtgtgggggagcccgaggcccggaacagcgccaggtgacttcgagagctggggtcaccgcggaaaagaagccattgcgccccacagctacgtgaagtgggaagggccggggttcgttggggcgagagaggtgcccttcccacaccctgctcctgccaaccgtaccccactcccttcactctgcccaccctgccctaccgcggctggccaccatgcttcctctcctaccctaggcccttcctttgtgatcaggccctgtccctgatcgcgcctctgtctcccttcctgttctcttgaggttttctcaggctttccagacttctcttgctgctctccctctcctgcttctctttctctactatctctttccactttctgcattcccctgtacctcgtctacccctggatttctccgtccagaatcactttctggtcccccaaatccctccaatctcatgaccccttcaccaccctccatcttttgttgttgttgttgttgttgttgttgttgagacagagtctcgttgtgtcccccaggctggagtgcagtggcgcgatctcggctcactgcaacctccgcctcccgatttcaagcgattctcctgcctcagcctctttgagtaggtgagattacagtcattcaccaccacgccggctaatttttgtatttttagtagaggcgaggtttcacatgttgcccaggctggtctcgaactcctgacctcaaatgatctacccacctcggcctcccaaagtgctgggactacaggcgtgagccactgcgcctggcccccaccctccatcttttttttttttttttttttttttttttgagatggagtctcgctcggtcatccaggctggagtgcagtggcgcgatctcggcccactgcaagctccgcctcctgggttcacgccattctcctgcctcagcctcccgagtagctgggactacaggcgcccgccaccgcgcccggctaatttttggtatttttagtagagatggggtttcaccgtgttagccaggatggtctccatctcctgacctggtgatccgcccgcctcggcctcccaaagtgctgggattacaggtgtgagtcaccgcgcccggctcaccctccatcttttaactgtttccccatgtccctgttcctaatagcctctctctgtttcctggcttatcttcccattagctgtgactccttcgacttcatcttacccctgtgattccttatctgaccaaaccttttccaatctctctctgctcacttattttctctcatcttctctctctcttttaagagacaaggtctcactctcttgcccaggctggggcacagtgatgcaatcatagctcagagtaacctccaactcctgggctcaagtgatcctcctacctcagcttccctagcagctgggactacaggtgtgggccaccgaatccagcttttttttttttttttttttttttttgagatagagtctcactctgtcactcaggttgaagcgcagtggcgcaatctcggcttactgcaacctccgtctcctgggttcaagcgattctcctgcctcagcctccagagtagctgggattacaggcgcgcaccatcacatacagctaatttttgtatttttagtagagacaggatttcggcatgttggccaggctggtctcgaactcctggcctcaagtgatctgctcgccttggcctcccaaagtgctgggattacaggcatgagtcaccacacctggcatcatccagctaatttttatttttattttttgtagagatgagggtctcactttgctgctcaggttggtcttgaattcctagcctcaagcgatactcccgcctcagcctcccaaagtgctaggattacagatttgagccaccatgcctggcctcatctggtcattctaaatagtattcccaccacaccccaaaacatctccctattcacttgttttgttttgttttgtttttgagatggagtctcactctattgcccagactgaagtgcagtggcacaatcgtgactcactgcaacttctgccttctgggttcaagcaattctcctgcctcagcctcctgagtagctgggattacaggcgtgcaccaccatgcccagctaattttttttttttttgagatggagtcttgctctgttgcccaggctggagtgcaatggcatgatctcagctcaccgcaacctccacctcctgggttcaagtgattctcctgcctcagcctcttgagtagctggaattacaggtgcatgccaccacgtctggctaatttttgtatttttagtagagatggggtttcactatgttggccaggctggtctcgaactcctgacctcaggtaatctgcctgccttggcctcccaaagtactaggattataggtatgggccactgcggctggccaatttttgtattttcagtaaagacagcattttgccatgttggctaggctggtctaaagtgacctggcctaagtgatcggcctgccttggcctaccccagtgttggtattacaggcataagccaccgcgcccagccctccctattcactttgctactccccttgacttatctgcatgctgatggccaccctatctttatattccaggacaccatggatacccagggaccagtctcccagccttttcagcagcctgagaaacctggtcgtgtccgtcgtcggaagactaggcgggaacgtaacaaggccctggtgggcagccgccggccattagcccaccacgatcctcctgtggccattcgggatccacctgtggtccctactgcctccaagctcgtggtcataacccagggccggctgagccgggagcaccggggtctcttcaaccacgaggtgaaatccctagatgttgcaaggctgcttagcagtgggaccctggtgccaggcagccccacactccccgccaagccctccccaagcccaggcagggcccaggaaccagccccacggtccagggacaaagagaaccaggtgcctggaggttcgggcccaggcccacccagttccccagagttgtctggcgtggggcagctgctggcagagctgcagtgtcagctgagtttgccacaggccttcccccggaggaacctgattcaggatgccagggatgccatcgtgcacaccttgcaggcctgtcatggttgtgtgcctgaccttgccctggtgcttcggggctgccagccacccttgccaggtgagcgtccctcctgcccctgtactcccctttcctttgtcggctctagctcagctagcctctatgcttctttcctctgtgccaggggccaagcctggggtctctgagagaaagatgacacccttctggattaatagccctgatcaagtcccagagcaggagaggcaaaggaagcaacaagggacaaaggagttcaccttccccatgccctacacctccagcatgcccactgcgcacagggggagtctggcaccgccaagaggtccctggccaccatactttccctcactgtcttcgccatctggaacagcctggggtcccccaacagcgtttgacttgttaaaaagcatctggctggtagccacgccaccccctcctcggccctggggggttggcctccctcagcccctgcctcagccttcatcacccctgttgccccgaacctctgtcctggactggagccccagccccccttccccactgcccagcctctcctgggtagtagcccagagcagtccggaagcctggtcttttccacccatgagactgtactgaggagaggctgaggctagggctggggacagatatcttgtactcccagtgacctcaataaagtacttttcatggtcctcttgattttcagtgagttgctgactcagaagagcagcttttcttagctctgagttctaggtccaagatggaggggaaggtactgttgcttgttaccttcatagggcctgaggagccagcatggtggggaaaattgggacttcaattagtccaacacatatgcccactgtggctaactgtgtacctgaccctgagctctggtgatgctggggctccagagtgagtgagacaaaggccttgtcctcatgaggctcccagtttggtggtcggcacacacaaccccagctccagtgattgtgtctaggagagcaagagaggtgcaggggctggggcagtccaaggagggagtgatggctgccctagtgaggagggaattcttcgtagaagagctgtgtttttctttctttctttctctctttctttctttcttttctttctttctttttccttccttccttccttccttccttcctttctttccttctttctttctttctttcttttttggagacagagtcttgttttcttgcccaggctagagtgcaatggcacaatcttggctcactgcaacctccgccacccaggttcaagcgattctcctgcctcagcctcccgaggagctgagattacaggtgtgcgccaccatacatggctaatttttgtattttaagcagagatggggtttcgccatgttggccaggctggtctcgaactcctggtctcaagtgatcctcctaccttggcctcccaaagagctgcaattacaggcatgagccaccgtgccctgcgaaccctctatttttcaagggtggtggaaacttggtacttgaggaaaagaacatttcaggcaaggggaacagcatatgcaagtcctggaggaggctgcatagcagatacagggccattttcactcagcaaatccctaggccatgctgggacctagagtaagccacatctgggcctgcccttgagcgcctcctggtctgtgaacacagggaacagtgtatgtgcaggctcagggcaggagtgacagatcagggctgaatctggcccacaggctttttttagtttcacccacgatatgttttaaatgttggaatcaattgcctactgttacaaaccaggcagtttgctttttttttttaaattgcatttctggcttctttcagaaggaaagaaaaaataaaaaaggatctggcagcagcactacaatccttcctggcaacaactggccaagtagcagaggccccctctttgtgggatccatgctctccattaaaaatgtttcacttatatttccagcttggccccttggcttagaaaatttgtaaaaaatggtattttgagcagcccccgttttctgcagtggagaaggatgaagctagaaatgtttgttggagtctgatcaggaaaatcaaggtgaagggcatggcttctactctggaaaagcctttctagggcttgctgttgtccactgggaaaccatagggttgatatctgcatagaggggactgggctaggagatcatagggctgaatgacttggcccaggtcttatggtggacaagtgaaaaagtaggggtcaggctgggatttgaatgaacccaagcaagttattttaacttggatctgaaacatgcttttggctatctcacactaccacctctgtctctcacagcaacccagcttcacagcatggtaagcagtgacaggtcatggtcaggcagaggggtacggtggttatactgaagcctccaccaccaccatgtggtgtaacaagtggcttcccctctctgtgcctccatgggcactttgcagggtgcatcagatctagaacgctggcaactccaggatggacacagctggggatggctgcaatagaggtggtgatgggcaatcaaagacttgttggccaggcgcggtggctcacgcctgtaatcctagcactctgggaggccgaggtgagcagatcactttaggttagaagtttgaaaccagcctggccaacatggtgaaaccctgtctctactaaaaatacgaaaaaatcatccgggcgtggtggtgggtgcctgtaatccctgctactcaggaggctgaggcaggagaatcgcttgaacctgggaggtggaggttgcagtgagccgaggtcgcgccactgcactccagcctgggtgacaaagcaagactcgtctcaaaaaataattagtttggggactacattgaggggaggccaggacagagcatgggtctggggatccggagaaggcagtctggaggaggcatggctttggaagacgtgagttcagtttaggacacaggaaaccataggtatctacgggactccaggaggggagggctggggcggggtgacagaggatgaacgtccccctcccacgcggagaagataggagtcaggttgggccctcttggaggagggggcagggagcgcggcgcccggcggcccctttaatcgggggcgcgcgctggccagcccgcgcgctctcgcctccattgccgggccagtgcgggagccggagcggagccggggccggagcgggcggaatggagcccctgcgcgcgcccgcgctgcgccgcctgctgccgccgctgctgctcctgctgctgtcactgcccccccgcgcccgggccaagtacgtgcggggcaacctcagttccaaggaggtgagcatgccgagccctcctctgcggcccgccggcccccgggggacgcaagggaggcgaggggagcgggtaccgcctcgccccctgccgcccctcctggcggactccgggagcctcgggggagtggggccgagggcgatgggggactgggccagagtcgaggctaaggggagccgtagggtcgcggccagacctgggggttgtaggagggacgttgaggtcagagctgagcggggagggggagcgggttgggagagtcagagtttgggaagggtggtgcagaggtggtgctgaagggacagcacttttcactcagcagagagccccgagctcgccgccacactcccgctcaggaccgggagggggccgtttggaagattcccccgcgcgggatggtctttgggagcacggggtggggtgcaggggagtgtggatattgggggaacggggttagatattggccaggacatgaggtggccaggatgagcatctggcccctaaggtctttctccccagaaagatcccgggaaatgcagggaggagtgtttgaatggaggggaggaaacttgggggggcaatggagggagaaaatcagggcggcaggaatcctggacccacagtgacgggatcagggaaggagtttggaggtgacctggtctccttctagtacttgggaagccaggtacctggggggtagggaagaaaagttgggggtctatggagtaaagagttcttgaaggactcagcggagggtcagactgggcccctttttcaggactgggtgttcctgacaagattttgtttcctctcggattacggccgactggacttccgtttccgctaccctgaggtgagtctcccccaacactcgccatgctgaggctgggtacttcccttggcctccaaaggcacaggctgccccagctcccggtccccaacatctctggtctgcaggccaagtgctgtcagaacatcctcctctattttgatgacccatcccagtggccagccgtgtacaaggcaggggacaaggtgagggctgtgaagagggcatagggggagaggggagaaggtcgttgctggccgggggagtgaccctgtccctgccttccccaggactgcctggccaaggagtcagtgatccggccggagaacaaccaggtcatcaacctcaccacccagtatgcctggtccggctgtcaggtgcaggctcagcctgggggagtgggcaggtgctgaaggatgaagccttcggggcatcaaggacaggcttcagccttctcgtttgtccccaggtggtatcagaggagggaacccgctacctgagctgctccagtggccgcagcttccgctcagtgcgtgaacggtggtggtatattgcgctcagcaagtgtggggtaaggggctggggtggccacctggaccaccttctctttgccttcctgccaacccccaacttgcccagggccccccttaggcctccctaccccccacagggtgatggattgcagctggagtatgagatggtcctcaccaatggcaagtccttctggacacgacacttctccgctgatgagtttggtgagcacgtggggacctagaaaccaggctctctgtgggacaccagagctgggtgcccactgaggggacatccacctgaatgaaccttactcctcctaccaaatcggcagggatcctggagacagatgtgaccttcctcctcatcttcatcctcatcttcttcctctcttgttactttggatgtgagtctggcacatggggtgtgggggaagagataggagggagcagggttgggggaggtgagctgctctccctttctgcctgtggacagcctttccctaccttgcttcctagatttgctgaaaggtcgtcagttgctccacacaacttataaaatgttcatggccgcagcaggagtagagggtgaggttccgtgtcccaacttttgggttctgaaagagaaggcacttggggccagacacctgggcctaagaggaatgcctgggggcctggactcctgggtcctgggggaggaggggctgggggcctggactcctgggtccaagggagaagggcctgggggcttcgactcctgggtcctgggggagaaggggctggagccctagttcctgggggaggatgggctggggacctggacccctggttcctgggggaggagggggtgggacctgacacccctgggtccttgagggagtataaaggccggaactaggctggacacggtggctcacacctgtaatcctagcacttggggaggccaaggtgggcggatcacgaggccaggagttcaagaccaacctgaccaacatggtgaaaccctgtctccactaaaaatacaaaaattagctggacatggtggcgtgtgcgtgtaatcccagctactcaggaggctgaggcaggagaattgcttgaacccgggaggtggagattgcagtgagccgagatcacgccactgcattccaacctgggtgacagagagagactctgtctcaaaaaacaaaacaaaacaaaacaaaacaataaaggcctgaactcctgagtctgggggaggaggggctgggagcctggactcctgggtctgagggaggaggagctgggggtctggacccctgggtcctggaggaggagggtctgggggcctgagcccctgggtctgaaggaggagggggtgggggcctggacccctgggtctgaggggggagggggtgagggcctggacccctgggtctgagggggtagggggtgggggcctgggcccctgggtccttggggagcagggttgggggctggactccagattctcctagcaggtgagtcggggtagaaggtctggagtcctaagggaggaggcgggattcagactgcctggatggtagtgctagagaacagtgatgccccagagctgctttctatcctttcttatctgcccatcctcccctcagtcctgagcctcctatttttctgcatctactggggtcaatatgccaccgatggcattggcaacgagagtgtgaagatcttgggtgagaatgaagctgggtggggagagggtggagcccagggctcaggttgggcatcaggtctgagcctggctctgagccgccccctcctcccttctcccagccaagctgctcttctcctccagcttcctcatcttcctgctgatgcttatcctcctggggaagggattcacggtgacacggtgcccgggcagggcgtgctcgtggggcggctggtgggggagcagggcaggggcagggttggggggctgggtgcatcctcctccctgacggcccccaccctgctgtctcccctcatggcctgctgccaggggccgcatcagccacgcgggctccgtgaagttgtctgtctacatgaccctgtacacgctcacccatgtggtgctgctcatctacgaggcggaagtgagtccgactggcccctggccgggccctgccttcccctgcttttggcgccgcctcccccttgacctgtctgctcgcccttgcccacatcctgctcctgctggctcgctctctctcccactcttcgattttctgctttcccatctgtctaagtgattcctcctctcttcaccatcccgcagcagctttctttctcctccctctgtctctcactgtctgtcacatttgtgctcaatatcgtgactaagagttcaggagtcacacagacctggattccacaccagctctcccacttcctagctgcctgaccttgggtgacgacccctgtctctgggcccattttcttcttggaaaattgggaggatcttacctaccccatggagcccctctaaggctttctatcgtctgtatggctttggccaaagggcttccctcttagccttagtttcctcttctgtgagatggagcagtaataagacctacctcgttgagtagatgctgatggaaaaactcacacatgagaggggtttagccctgtgttgagcaaacagtaactgatttattctcttcctgtctttttcaccctctctctctacctcaatatgcttctgtctccgtgcctggctctcctgttgcttgtgttctgaccgagtacctctgttcccaagtgcccaggggtggggtccggggaccctaatagaggggaggaggccaggctgtgatggaccctctcctgcgggtctagttctttgacccaggccaggtactgtacacgtatgagtcgccggccggctacgggctcattggactgcaggtggcggcctacgtgtggttctgctatgctgtgcttgtctcactgcgacactttcctgagaagcagcctttttatgtgcccttctttgctgcctataccctctggtgagaattggtgggccccagcctgtccctgcctccctctcggggctccccagaagtggttgccccccatctcagaccctccatagtgagggagatggacttttcactcaggcagctgttgcccagaatctgccacttactcactttgtgaaaaattactttcacaagaagtgcatcaggtttacccataaaacaacaggatctcgccaggcgtggtggctcacgcctgtaatcccagccctttgggaggccgaggtgggcgtatcacaaggtcaggagattgagaccatcctggctaacatggtgaaaccccgtctctactaaaaatacaaaaaaattagccagccatggcagcatgcacctgtagtcccagctgctggggaggctgaggcaggaaaatggcgtgaacccaggaggcggagcttgcagtgaaccaagatcgcaccactgcactccagcctgggccacagagcaagactccatctcaaaaaaaaaaaaaaaaaaccaaacaggatctcctcaggccgggcgtggtggctcacacctgtaatcccatcactttgggaggccaaggcgggtggatcacctgaggtcaggagttcgagaccagcctgatcaacatggtgaaaccccatctctaccaaaaaataaaaaaattagccgggcatgctggtgggcacctgtaatcccagctactcaggaggctgaggcaggagaattgcttgaacccgggaggcagaggttgcagtgagccgagatcacatcattgcattccaacctgggcaacagagcaagacttcatcttcaaaaaaaaaaaaaaacaggatctcctcaaagggatatcttgagcaagcataggccactatatgagggccgagtgtctggcacatagtaaatgttcagtaaaaaactattgtagactgggtgcgctggctcatgcctgtacccccagcactttgggaggccaaggtgggtggatcatttgagatcaggagttcaagaccagcctggccaacatggtaaaaccccgtctttactaaaaatacaaaaaaattagccaggcatggtggtgcacgcctgtactgccagttactcgggaagctgaagcaggagaatagcttgaacctgggagactgaggttgcagtgagttgagatcgtgcccctgtactctagcctgggcaacagagtgagactccatctcaaaaacaaacaaaaaacaacaacaacaaacaaaacaaaaaaacacccaaaactattgtaattattatcgttcaccataacatagcaataaggttggcagattctgagccagactgtccgggttcagatctcagctctaaagcttatagatgatgtgacctcagacgagcccattaacttctctctgcctcagtttcctcaccttttaatggggatggaaattttatctgcttcatagagtcactgtgagagttaaatgagtttatatacatcaaatgcttagaaacaggcctggcatgcaataagtccttacttcttattatcatttgttcattcattcgtcaaatatctatttttttttgtttgtttgttttttgtttttgagacggagtcttgctctgtcgcccaggctggagtgcagtggcacgatctcagctcactgcaacctccgcctcctaaattcaagtgattcttctgcctcagcctcccgagtagctgggactacaggcgcatgccaccacaccctgctaatttatgtatttttagtagagatgtggtttccaccatattggccaggctggtctggaactcctgacctcaggtgatccacctgccttggcctcccaaagtactgggattacaggcataagccactgtgcccggcctgatttcttctttttttttttttttttttgagatggagtttcgctcttgttgcccaggctggagtgcagtggtacaatctccgctcactgcagcctccgcctcccaggttcacgtgattcccctgcttcagccttccaaatagctgggattacaggtgcatgccaccacacccagctaattttgtatttttaatagagacggggtgtcaccatgttggtcaggctggtctcgaactcccaacctcaggtgatctgcctgccttggcctcccaaagtgctgggattataggcgtgagccaccgtgcccgggctgtctattgatttcttatcagatgccaggatttggggtggtgtggaactgagttaaattgaacctccttcttgcccctcagaatttcccagtccagtcctgccccatttcagtctctggcttctgaaggtcacactggcttccctccagtttgggacctgcctggggtctgcgtgtgtacatggcaggcgaggtggggctatagggtggggtggaggacaggagcagtgtctctactgacccaatacttccccttcaggttctttgcggttcctgtcatggccctgattgccaatttcggcatccccaagtgggcccgggagaagattgtcaatggcatccagctggggatccacttgtacgcccatggcgtgtttctggtgaggatgggcatctgtggggggtggaggggaggacccgagggcagaagatgtgtgaggctcctacacctgatctgctggacctcctgttctgaggtcttgatccattttccttttagtcattctccctttattgagagcctgcttggttcctgcagtctcctctattgtgctcctcagagtccattttcttctctttttttttttcgagacagagtctcactctgtctcccaggctggagtgcaatggcttgatctcggctccctgcaaactccgcctcccgggttcaagtgattcttctgcctcagcctcccgagtagctgggattacaggtgcccaccaccacatgcagctaattttttgtatttttagtaaaggcagggtttcaccatgttggtcaggctagtctcaaactcctgacctcaggtgatccacccgtctcagcctcccaaagtgctgggattacaggcatgggccacctcgccgggcccatgcccattttcttctgttcccctctccaactttgtgtcctggcttctttcctcaacccccatcctctctctttgccctcccttcccatttccattcctgaccctgtgtccccagattcttccatttctcttttgtatccccactgccttccccaccctccttgatctctccactctccccctgcccctgcccaaattctgccatcacaggccactgttcaggaagaagcatctggggtggcacagggtgaagcttttgggctcctgggtcggcaacaggagggtacagcaccacatcttttttttttttttttgagacggagtctcactctgtcactaggctggagtgcagtggcgcgatcttggctcactgcaacctccacctcccaggttctcctgcctcagcctccggagtagctgggactacaggagcacgccaccatgcccggttaagtggtttttttttttttttttttttgagacggagtcttgctctgttgcccaggctggagtgcagaggtgcgatctcggctcactgcaacttctgcctcccaagttcatgccattcccctgcctcagcctccctagtagctgggactacaggcgcccaccaccacgcctagcaaattttttttgtatttttagtagagacggggtttcactatgttggccaggatggtctcgatctcctgacctcatgatccgcccgcctcggcctcccaaagtgctgggattacaggagtgagccactgcgcctggcccccaccacgtctattctttgccctggttcacatcctatctgacattcttggtgacagttctaatattcattaatttattcatcaattgttcactgggcacctgtcttgaaccagtctgtttcattctaggaacatccatatgcatttactcctgccctcttgtttaattgtcagagcagctccaggagagggtggataattgacattgttcccactacacagagcggggaagctaaggcccagagaggagaagtgacgtgccagggctccgtggcctttggcggcaggcaaatactttgaaccctatccttctccagcagaccacaaggtctgaaatgaaggggaaccagaaagggcaacaggcatgacccagtgtcccagcttctgactccagggatctacaacgtaccccgtgtagggagtgggcccagccaccgagggaggggacaggtccccatcctttgcctcagaggctgacataggtacagactcgctcaccttcccaggctggtctatcctgaagctctgcaggaagtcagaaagggacagaaagaggagaaatgctgagaacccatcatgtgctgggctctgcaccagtggttttcatttccaccctctcatctttccaagtaggcgctacagtcccttttccccacagcgaggctcagggagtttaatcaacatgccccagatcccatactcagtgagctacagatcccagaggcgggatgcaggctcagaacggcaagcacagcgcccttcctgctgtatctcagccagcttccttcctaaggatgctcacgttagctcagcacagctccacctgggtatctcaacgctcattgctttcagctccttgttcatttttttcagcacaaccttagaagagctgtgttaggtttccgggatatggcggtggagtcacacccagtccctgccttcacagcctatcagactaactggtaccagacatccctacattccaccaatatttatttatttatttatttattttaaattttttttttttgagatggaatcttcctctgtcgtccaggttggagtgcagtggcatgatctcggctcactgcaacctctgcctcctgggttcaagcaattctcctgccttagcctcccaagtagctgggattacaggcgcaccaccacacctggctaatttttgtatttttagtagagatggagtttcaccatgttggccatgctggtctcaaactcctgacctcaggtgatccgcccgcctcggcctccccaagtgctgggattacaggcgtgagccatggcgccttgcccaccaatatttactgaaggcttatatgcgccaggcatggttctagaaggtactagggactcagtagggaacagaagagtctggttcctgcctcatcgagacattttagagtctattagttgctgtccaattgaactttctgtatttatgaaaatatcctattacctgcactttccaatatgggagctactaaccacatgtggctgttgagcacttgaatgtgggtagtgcatagtgagtgtgtagtgaggagtgtgaccaaaatttaaattttattttgattaaatttaagctacatgcagccagtggctatcatacagtgcaggacgctgaccctaagcaatcagtgacagctcagtgatcaggcctctgatggaggaagcacaggccgagttttgttgaagggaaaaggtgagggtccagggcatttggagagcccagaggggacgcctaatccagtgtgaatggcttcagggaagtgtggtggatgtcaactgaaagggaatccttcggaccccaagtttatggggacagcctccggcctgacagtgcctctcacacctgctcctggccctggcctcagatcatgacccgcccatcagcggccaacaagaacttcccgtaccacgtgcgcacgtcgcagatcgcttcagccggagtccctggacccggagggagccaatccgctgacaaggccttcccgcagcacgtctatgggaacgtgacgtttatcagcgactcggtgcccaacttcacggagctcttctccatccccccgcccgccacctccgtaagccccgcggccccagcgcccgaggagctgctggcgccgcccctggagtacctgaccccgctcccggccccgccgccgcccccagcgcccggacccctgagccctcctcctgcctttcgcactccccgcgccccaacaccgcgccgcgaccgtcccctggcgcccgcgcccaccctgcctgactgggttctggcgctgttgcgcacacccccgcagactccctgcgccgtgcccccaccgcccgccttccgcggctctcccccagctccccggccgccgccggagttcgccccgcgcgccccgacgccgccctttgagtacctggccccgctgcccaggcgccccgccacccagtccttccctgactgacaacgtgcgtccacacctggggtggaagggttctccgggggagggggacgggccttcggggccgcatctgccccccgagggtcccggacggcctctgaccctgacccccctcccaggccgggaagcaggtggaggagacagcggtggcggcggcggtggccccgaggggccgcgtggtgaccatggccgagccgggcgcagcctcccccccacttcccgctcggttccccaaggcggccgactcgggctgggacggcccgacgccgccctaccagccgctcgtgccccagacggcagcgccgcacaccggcttcaccgaatacttcagcatgcacacggccgggggcactgcacccccggtctgagcacccctgcccgcccctgccccatgggccatgaccgggccccggccgggctccggacccctgctttatcccggcccgagagctcgcccatccccggccttcccgacccttcccaccccgcgcgcccaggttgggtacgctgcgtcccgcccccctcccctctgtgccaaacggtcccgcgggagccgctctccccgtcccctccctcagcccctgccccgagcggcgccggattctgggctcccgctgttccgtgacctccggccccctggcccccttcgagacctctgaccccgctggactccggaacacccgtggtgaccgccgggaccctgcctgtgactctccaggactctgcgaccccgggatggatattgcgatgctggtctcgaccctgaaaccctccctcggatctgtgacctcggacccgtactccatctgccgcatctccattccgggggccttccctcgggtccctggcagaaagacattttaccccttcttgccaaaataaaaaaggattcgtttttatctataacatggcttcttttgcatcttgatggtgttcagcggcggggctgagccagaactatgtcaggctcgggacctcagtgtgtccatctgtgaaatgggaatttggaaccggaggcaggggcctgtataacctgatctttatgttgccccagaatgtgggaacattgaagatgatcaaacatctagcagggtcttgcaccgctcctttatttttgccttcctttcctcactcagaggtagaggcgccctccagtggcccatgctttgctgaaccacaggcacccagagtttgggttacgatcttagcactgcgcatatgtgtatttctctccctccaggaggacgctgctgcgcatgcggttgggaacaaatgggcggggatttccccggaagtctccctttatggagggttggggttgggcgctccgcagtcctcccagggccgctctgaccggccgctctgtaacttctcgcctcctcttcgccgtccctcccacagcggctgctcggctcccgccccctcgccctcccacagcgggtcttcccgcggccgctctggcccaagcgtcccctcgtctctctgatctggcccatccggcttcggagggaggcgagggtgggtgagcaaagggattgggtctgtggggtccaggcccgaacccctgaagacgggctccgcccccggcacccgctcgcgccccgcccccggctggaggagtctctcctggaccatccgaacctagcctgtcccggcccgcagcctctatggaggctcctgccgggccgtagagcccttcgccccctggggacccacccgtctataaggtccgtttggcctgcagcagcctgagtccgtaatgctgggcactgttcatgggatcggccccctatggagccctgtgtctataggggactcctacggtccctagggttcggccccgtccataatgactccatatacagggccttccatcgctctatagggctcagccctcggcttccagagcctgtcagcagtggccgtacccttcgccgggactgccgggtctccgggacctcttcgatctacaaggtcatgttatgcctatagaggtcgcatttgcagggcctcaccccgggtagagggtcctctccaggtttttacggcctgtccccgctctaagggtcagtgcaggaggcggcgatggccctgggcaaggttctggccatggcactggttttggccttggccgtgctggggtcgctgtcccctggggcccgggcgggggactgcaaggggcagcggcaggtgctgcgggaggcgccaggcttcgtgacggatggtgcgggcaactacagcgtcaatggcaactgcgagtggctcatcgagggtgagtggggccgcgtgggtcactcactaattcgctggtagttcattcatgtgtgcattcatccactcaccacattcccagagctcggttctggtccaggccttttgctctaaaatgcctgacacccagggttgcagccaacctgggccctgccctggaaggcctccaagtctggtgggggagatgcacctacacccagatttacaattacaagacaggagcatcagtgccgggccttctgagtaactgttaagaactcagggtctgggtccaatcatttggctttgaatttggttctactactactacttttttttttttttttttttgagatgggggcctcactctgtcacccaggctggagtgcaatggtaccaacacaatttacttactgcagcctcgacctcctgggctcaagtgatcctcccacctcagcctcccaagtaactgagtgtgtagagacagagtctcaccatgtcgcccaggctagtcctgaactcttgggctcaaacgatcctcgcacctcagcctcccaaagtgttgggattgtaggtgtgagccactgtgcctggcttcttattattagctttgtgactttgagcaggtggttttctttctctgaggttctgtttccttcccccacaaatgggataacaacagtactcacctcatagagttgttggaatgaaatgaaaacaggtatttaacatgcctgatgtgtggcatatagtaactgttcaataaatggcattaggattattgttgttgttatttgtgaagtacttcaataaaagcatttttcttcagtcattcatgtgccagacattatgtttcccattggacatagcccagactgagacagctccagcaatccctggtgacttaggtcttggagtctagttggggagacaaacacattaatagtgagagacaagagtggtctttgatggaggaaccccagaggcctgggagagcccagagaaagtgcctgatctggggccggggagaacagagaggcttcctggaggaggaaatgtctaagctgagacttaaaggaccaataggaatctgtcaggagtgggaggaaaggccccagccctacccttctgggctcccagtcagtgggagagacaaacccactccgaggctgtttgttttccttttccacccaataaactcctatgcatgcctcagaaccctgccccagtggctctttctctgtgaagacatgtggcttaacctggggtatagctgagatcagaggcatctgtacgagggagcagaagggcattccaggcaagaatagctgtgcaaaggcggggaagcgggagagtgatgcttttgaagaactagaaatccagtgtgttaaaacatagaatactggcagggtatggtggctcatgcctgtaatcccagcactttgggaggccgaggccggcagatcgcctgaagtcaggagtttgagaccagcctgggcagtatggtgaaaccccatctctactaaaaatacaaaaattagctgggtgtgatggcgcgcgcctgtagtcccagcttctcaggaggctgaggcacaagaatcacttgaacctggaggttgcagtgagccaatattgtgccactacgctccagtctgggcggcagagcgagactccatctgaaacaaaaacaaaaacatagaatacaagacaacgaatgagccagaggctgcagggtgggaggagccagcaggtgtagggctctgtgattttgagctgtatcctgagggcaatacaggggtgaaagagaagttgaaaggcagtacctgcagaagcccaggaaggcctcacagagtagtggatgtaaaagctggcctccagacaggggaggtcctgggcaaaggccagaggtgtgacagagcctggatcatgcagggcctcccttgggaggctgtggagctttgtctttgtctgggggctctggggagctatggaagggttttgagcagggagaggacatgatctgatttatgttttagaagatctctctggctgctgtgtggggtatggatgaaggcctgtttctcagtgatagcatgtctacctgttcccagcttgggggccattcctgtcaagctagtgggatgagaacagaataggaagtgtgtgtgtgtgtgtgtgtgtggcgaaggggtctgtgtgctggatataaatcactctctggccttaaagagtcccagactggttaggccaggtgcggtggctcacgcctgtaatcccagcactttgggagaccaagtggggcggatcacctgacgtcaggctttagagaccagcctggccgacatgaagaaaccccctctctactaaaactacaaaaattagccctgcgtggtggcgcacatctgtggttccagcctgggtgacagagcgagactctacctcaaaaaaaaagaaaaaacgtctcagactggttgggaatggtggggctggacacagatattcagcccccagtgtgttcactgagacagtgctcagggctaagaaggaaagtggaggggtggggtggatgtacctagggaggaaagaggactgtgctgcagataacagagcaggagccactaaaatagggttctgaagcatgcataggagtttattgagtgggaaaagggagcaaacagcctctatgaagacgtgagggtggctggagtgtctcaggatccccatctaggtttgcctggtcttatggcacttttgactgggaggtaatgagagccagaagcaggggaagaggggccttgaatgtcacactgagcagcctggccttccccttggggttgatgggcagccacaggaggttttgagcaggagtagggcattgccctcaggttgggtgtggggcagactggagacttgatgagctgatctggcaagagaggatgagttcctaactagggcaggggcttagaggggtggagaggtgtagacagtgcaatcgatgtttgtggagtttcacctataagacttggggaccaactgggtagatgttggggtgagggaggaggctgggagacctccagatcccccttgatgatcttctgttcttaccaatgcctgtcacttcttacctataagaaccaacatcttcctctatctattataaaataaacaaccagccaggggcagtggcacatgcctgtaatcccagcactttgggaatctgagatgcaaggattactcgagcccaggagttagagactagcctgaacaacatggtaagacactgtctctacaaaaaaattacaaaagattagctgggcttggtgggtggtggcatgtgcctatagctccagctaccggcgaggctgaggtgggcagatcccttgagcctaggaggctgaggtctcagtgagccgagattgcgctgctatactccagcctgggcagcagagcgagaccctgtctcagggaaaaaaaaaaaaaaaagataaacaaccaacctactaacttttgtattatgttcatactttatctagtcctagactttttttttccgagagagaatcttgctctgttgcccaggctggagtgcagtggcttgatctcggctcactgcagcttctgcttcccaggttcaagtgattcttgttccttggtttcctgagtagctgggattacaggcatgtgccaccatgccgggctaatttttgtatttttagtagagatggtgtttctctatgttggccaggctggtctcaaactcctggcctcaaatgatctgccctgggattacagacgtgagccaccacgcccagcccagtcctagtccttataacatcctcatggataagaggcatcctgcttttgagcaggagggagtttgggatcagatttctgtctggagtggtatgggggttgggtggaaacagaagaccttcaacttagggaagaacttggggaggcagatggtgagctggcctccagcaggcacttaacaaagatgtacttgtgattccagaaacagagctttatagtttggttgaggctggtaagattctgggaggtctggttgtgtggccgtgctgaatggttcttctgcattccccaaagcatgggtggggtctgtgtctgatgtcttgggggctctggttagagcctgagggagagcttccagctttagtattctgtcttttatgtatttcttcatttcatcatccagcatttcctgagcctttgccaagcccgggtctgggcaatgctgcagagggaattaggtccacatccaggccctgctctatgggccttgtaggctgcagggagacagacctggacatagatgttcctggcccagaggaatgaaggttataatgggatgtgagaaccctggagagggggcatctaacccagctagggggcatcaggaagaggcctggtggtgggaagggataatatgttgcagacagagggagaagcttgtacaaaggcccagctcccattagagctgtaagcagtggggtgatttgagacaaagcgagggtctgaacagcaggttagggacctggactttctcctagggtggtagggagccatgcagggctttggggcaggggagggacggggccagatgttgagttgggaagatcagagactcatgtcaggggaagaaggaggttggatcagtggttctggtgagacaggatgaggccgggcagccagggcacactctggctctaagctggcaggctggagtcatcacctcgttgaatgttcaccccagcctttgtgggtggggggaattatccccattttacagtcatggaaactaaggctcagagagcccatggaactggcccaggatcacccagccattggcagtggtggctgagtgtctccaggatccagataggcacactgagggtcatgggggaaagggctggcccagggtcctccagctggtcatgggcagagccagagccagagccagagcctaggcctcctaatttccctcacccagaggactcccctgagctgcctgttcagaaggcttctcatgtgggatgtggaatgagagaggctacctgaactaggactggcagagaataagacagtgacagtgttaggggtagtggcactctccacgatatgtgggccccattgtcaacatttcttttttttttttttgaaacagagtttcactcttgtcgcccaggctggagtgcaatggcatgatctcagctcactgtaacctctgcctcccgggttcaagaattctcctgcctcagcctcccaaatagctgggattacaagcatgtgccaccatatccagctaattttttgtatttttagtagagacggggtttcaccatgttggccaggctggtctcgaactcttgacctcaagcgatccacccaccttggcctcccaaagtgctgggattataggcgtgacccacggcacccagcctcttttttttttttgagtcccctctgtcgcccaggctggagtgcagtggtgcaatcttggctcactgcaacctctgcctcccgggttcaagcaattctcctgcctcagcctcctgagtagctgggacttgcaccaccatgcctggctaatttttgtatttttttttagtaagagacagggtttcaccatgttggccaggctgttctggaactcctgacctcaggtgatccacctgccctggcctctcaaaagtgctgggattacaggcgtgagccacccaccccactctgttgtcaccatttcgtgtgcattattgctcctcatgaggttgcagtcagatgtcagctggggctgcagtcagctgaatgttcaccttggctggacatccaggaaggtccctcccagggctggcagttgatgctggctgtcagctggaagctcagttgggactgtcagccggaatgcctgtgtgtggccttttcttgtggctttggcttttctttgtttttttttttgagacgaagtctcgctcttgtcccccaggctagagtgcaatggcacaatctcggctcactgcaacctctgcctcccaggttcaagcaattctcctgcctcagcctcccaagtagctgggattacaggcacccgccaccatgcccagctaatttttgtatttttagtagagacggggtttcgccatgttggctaggctggtctcaaactcctgtcctcgtgatccgcctgccttggcctctcaaagtgctgggattacaggtgtgagccaccgtgcccagccggctttggcttttcctatcatgacagctgtgttctgagaaggagcattctacgaggcccaggtgaaaagtacaagtcttcttatgatctagccttggaagtttcagaatttctgctgtttttttattggtcaagcaagtcactaaggctcttcccagatacgagaggcagggaattaactttcaatggcaggagtggcctataagtttgattccaccacagtaccactatatcccactttagagatgaggagaccgatccagagggggtgggttacttggccaagatcacacagctggtagctatttggtggcagagccaagacataagctcaggcagtctggttccagagtttgtgcttgtaaccatcacaataagcagaggtgagactctggatggggacagaggggaactatgccgctccaaggttaggcctctgttctgggggaagaagctggactcttctcttgcagctctattcagcgtgggccaggggtggtgtcacggaggtgctcttctcactgggattatgaccttgaccctccagcctggacatgtctgaaactcaggcatggacaggaagagagaggcatcaggaacactggattctgctctgtgtggccactgggatggggttttctctgtacttaattttcccatctgaatggtgggagtgttcattctgatctcaggtgacctttctagaggtctggaatattatgattctttctctgggctcctgtccctctggctgtcacagcccttgactgccctaggttatgagactgggggccccttcaaggcggggcccaggtctgactcattcttgagcccccagcatcacctggatcagggtttggtgtacaattgtgggaggctgcagggaggtgtggggagaaggtccgctttagagcttggtccctctgtgctcacctcccagccccaagcccccagcaccggatcctgctggacttccttttcctggacacagagtgcacgtatgactacctgttcgtgtatgacggtgactccccgcgagggccgctgcttgccagtctaagtgggagcacccgacctccgcccatcgaagcttcctcaggcaaggttagtggggatggggccgtggcagatacaccgagggaaatggaagaagaaaggagggacagagagtcagtaagagggcatccaagagcagagcacagggacaagggaaggtggagagaggcaaaggaaggagatgaggctctgggtcccccagggtggaagggggcaggagtgggccaccctcccaggacaatccccaggccctgcccaccttacccagcacaccttgtgcccgcagatgctgctgcacctcttcagtgatgccaactacaacctgctgggctttaacgcctcattccgcttctccctgtgcccgggtggctgccagagccacgggcagtgccagccaccgggtgtgtgtgcctgcgagccgggctgggggggtcctgactgtggcctgcaggagtgctcagcctactgtggcagccacggcacctgcgcctcggtgagccggtccccagccctgtttcccctggggccctgatctgtgagcgcagcctccacgcccatctcctaggtctgaccttgctcctgcatgaaactccccccaccaccccaccctcctccgtgacacccacttccctctccttccagagcttgcccctcacctgttactccaaccccaccccaccttcacctgcagggcctcccctgctgaggatatcccactctcatctataccccactctcatctgtgaacaccaccctccttcctccagccaggcccaaatctgtcctcccatccagccactctgtgtggccttggacccctgccatgacttccagcctcgcaccactgaccttacgccgaagctgtgtacatccagctttcaatctggattgcgctttgagccctccccgccttgacctccccagatctgagctctttcagtccaggctgaatgtcaactacgctgtctgtattctcccagcctgccgtctttctgtcttttctcctttttctctgtgcatcttttcctttttctgttggtcttcttttttccgtctgtctgcttccttctgattgtttctctttgtctcttgtttctgtctgacagtttgcctttcccctcttcctgtctctctctgtctccctttctctctctctctttccttttccatcctctcccttcctgtctgtctctttctctctccctttgtgccctgtctgtctcattctgcctcttttcctctctgtgtctcctttgtctctctgtccttgtctctccctctcttatctctgcctttatgtctcctttcccgcagcccctgggaccatgccgctgtgagcctggcttcttgggacgtgcctgtgacctgcacctgtgggagaaccagggggctgggtggtggcacaacgtgagtgccagggaccctgccttctctgcccgtattggggcagctggcgccttcctgtccccaccagggctgctggcagttttcggaggtgagcagatggggcgagtatctgggatctggaggcccggcagcctatggccagggcatgagactatccacccctccacaggccaggacctcaacaatgccctgggtgacctcgtcctatacaacttctccgccaacacctgggagtcttgggacctgagtcctgccccggtatggacccctcctctgccctggaggagcctttccactcaatcagacccagccggggacccccggaatgatcccctatcacctagtgctcccacagttcctgcagcttgatataggaacctacttctccctgtttctgccttttctctccggttttcttttttcttcttcctcttcctttatctgcctttgtgcatcttatttttccatgtgtctcctgttgctcaatctgtctctgttttcgtctgtctgacttttgggcttctgtgttctctgtttctgtgtctccatctctctggatctgtttctctctgccatttgtccctttaactctgtctccttgccttttctctctcttattgtatttctctgtttctatgagtctgtctcttcttttctctctctgccggtctctgcctttctctttgtctctgtctttatctcgccttctctccatgtttctctggctctgcatctctctgtctaagcctggctctggctctcttgctgtgtctctacctctgtctcttttctcttcctcacaggctgcccgtcactcccatgtggccgtggcctgggccggctccctggtactgatgggtggtgagctggctgacggctcgctcaccaacgacgtgtgggccttcagtccactgggcaggggccactgggagctcctggcaccacctgcctccagctcctcggggcccccaggcctggcaggtcacgcggctgccctggtggatgatgtctggctatatgtgtctggaggccgcaccccgcacgacctcttctcctctggcctcttccgtttccgccttgacagcaccagcgggggctattgggagcaggtgattccggcaggcggacggccccctgctgccactggccactccatggtgttccatgccccctcccgtgccctgctggtccatggtggacaccggccctccactgcccggtaagtgacctgtcccataacccatgctccacaggccaggcccagctcaacaccataggcctttagtctttagaggtctttgcccactgtcggactcctgtggtctctcagtcactccttccttcatgtatttacttattccttcgttcactcattcattcattcacccactcacacattctctgatgttttattcaatctcttggtgaattgccttccacacactcccacccatgtatctattcaacagagccctgcttggtgtccagcccttgctagcttatgcaggtaactcagagatgactcagggtcctgcccacagggaacttctagtttggaggggacatagagtcagtcatggccagtctcatccctgggtgatcacatggctcctaagagcctggaggagggagagagacgcttcctgccctgagcccctgccctgcttctccttcggtaggttctctgtgcgagtgaactccactgagcttttccacgtggatcggcatgtgtggacgacgctgaaggggcgggatgggcttcagggcccaagggagcgagccttccacacagccagtgttctgggcaattacatggtggtctatggtgaggaggctccccaatcctgcctgcctgcctgctgagggcctgagccaaccctgagctgaggctccctgcaggggagtccccccacctcccctaggcttgccagctatgcccctttcctccattcccagggggcaatgtgcacacccattaccaggaggaaaagtgctacgaagatggcatcttcttctaccaccttggctgccatcaatgggtgtcaggagctgagcttgccccgccaggaacccctgagggtgagtggtccctgttcttccctaggggctcctgagggtcccacctctctccatagtgattctgggctcaagccacctcagtccgtaagggtgagcctgacatccaggccagttggtgccagccttaggaggcaagcctgggatggagatgggactagggcatcgtcaccatggagatgggaggcccttaccgcagtatccaatgtgggttccaatccaggttttgccagtttccagctgccccagggaaatgcctaagaggcagcaacttttccttctttttaactttcttttcttttctttttttttttttttttttgagacggagtctcgctgttgcccaggctggagtgcagtgatgtgatctcagctcactgcaggctccaccccccgggtttcacgccattctcctgcctcagcctcctgcatcgctgggactacaggcgcctgccacctcacctggctaattttttgtatttttagtagagacggggtttcaccgtgttagccagggtggtctcgatttcctgacctcatgatctgcccgcctcggcctcccaaagtgctgggattacaggcgtgagccaccatgcccggcctcttttctttttttttgagagggagtctcgctccgtcgcccgggctagagtgcagtagcgtgatctcagctcactgcgacctccacctcccgggttcaagcgattctcctgtctcagtctcctgagtagctgggattataggcatgcatctccatgcctggctaatttttttgtgtttttagtagagacagtgtttcatcatgttggccaggccagtctcaaactcctgacctcaagtgatcctcccacgtcagcctcccaaagtactgggatcacatgtgtgagccaccatgcttggcctttttaactttcaatttaggttcagtggtacaagtacaggtttattatataggtaaattgtgtgtcatggggatttggtgtactgattatttcatcacccaggtattaagcctagtacccaacaggtaggttttttttttgttttttttttggggatggagtcttactgtgttgcccaggctggaatgcagtggtgcaatcttggctcactgcaacttccacctcctgggttcaagtgatcctcccgcctcagcctcctaagtagctgggagtataggcgcatgccaccacacccggctaatctttttgtatttttagtagagacgaggttttgccatgttggcaaggctggtctggaactcctgacctcaggtgatccgcccacctcggcctcccaaagtgctgcgattacaggcgtgagccactgtgcccagccccagtaggtagttttttgatcctctccctcctccaaccctcaggtaggcccctcaagtgtctgttgttcccttctttgtgtccctgtacactcgatgttttgttcccacttgtgagaacatgcagtatttggttttctgttcctgtattagtctgctgaggataagggcctctagctccatccatgctgatgcaaagaacatgatctcattcttttttatagccacatagtattctatgatgtatacgtaccacattttctttttttttttttctttctatgtatttttttttttttttttttttttttttgagacggagtttcgctctgtcgcccaggctggagtgcagtggcgggatctcggctcactgcaacctccacctcccaggttcaagcgattctcctgcctcagcctcccgagtagatggattacaggcgcctaccaccacagccggctaatttttgtatttttagtagagacggggtttcaccatgttggctaggctggtctcaaactcctgacctcaggtgatccacctgcctcggcctcccaaattgctgggattacaggcgtgagccaatgcgcctggcctccattttctttatccagtctatcattgatgggcatttaggttgattccatgtctttgctattgtgaacagtgctgctttgaacatacacgttagaacaatttatattccttggggtatatacccgataatgggattgctgggtcaaatggtaattctgttttaagttatttgagaaatcttcaaactgctttccacaatgcctgaactaatttacattcccatctgcaacctcactcgcatgtgttattttttgactttttgataatagccattctgactggtgtgagatggtatctcattgtggttttgatttgcatttctctcatgattagtgatattgagcattttttcatatgcttattggccacgtgtatgtcttcttttgaaaaatgtctgttcatgtcctttgtctactttttaatggggttgttttttgcttgttagtttatttaagttccttataggttctggatgttagatctttgttggatgcatagtttgcaaatattttctcacattctgtacattgtttactctgttgatagtatctttagcagtaactttttcaagatcacagtagataagtgacagagccagcatggctatccccaaacaacaatctgtataaaactatcacttaaggccgggtgcagtggctcacacctgtaatcccagcactttaggacgccatggcgggcagatcatgaggtcaggggtttgagaccatcctggttaacatggtaaaaccccatctctactaaaaatacaaaaaattagctagtcatggtggcatgcgcctgtagtcccagctactcaggagactgaggcaggagaattgcttgaacctgggaggcagagcttgcagtgagctgagttcgcaccactgcactcccacctgggcaacagagtgagattccgtccccaaaaaaacaaaaacaaaaactattacttaatctctgtgcctcagtttgctcatctgtgaaatgaaaattataacacgtaatgccattggatagctgtaagagtaaattgagatgatccttcaagaatgatgcccagtgaagtgctccacacatttcctttcttttttaaaatttttattatttatttttgagacagagtcttgctctgttgcccagactgaagtgcagtggtgtgatcttggctcactccaatctctgcctccgaggttcaagcaattctcatgcttcagccttctgagtagctgggactagaagcgtgtgccaccacacccggctaatttttgtatttttagtagagatggggtttgccatgttgaccaggtgggtctcgaactcctggcctcaagtgatccatctgcctcggcctcccaaagtgctgggattacaggcgtgagccaccgtgcctggcctaatttttgtatttttttagtagagatggggtttcactgtgttgaccttgtgatctgcccgcctgggcctcccaaagtgctaggattataagcatgagccaccgtgcccggccaggcattattattattgttgttactattttgttttattttacttgagatggagtcttgctctgtcacccaggctggagtgcggtagcatagtctccactcactgcaacctccacctcccgtgttcaagctattctcctgcctcagcctcctgagtagctgggattatagatgtgcaccaccactcctggctaatttttgtatttttggtagagttgaagttttgccatgtttgccaggctggtcttgaagtcctgaccttaagtaatctgcctgcctgggcctcccaaagttctgggattacaggcatgagccaccacgcccggcctattgttactattttagaggcagagtcttgttctgttgcccaacctggagtgcagtggtgcagtcatagcccactgcagccttgacctcccgggctcaagcagtcctcccacctctgcctcccaagtggttgggaccacaggcccatgctacccttcccagctaattaaaaacagaatttttggccaggcactgtggctcattcctgtaatgccagcactttgggaggccaaggcgggaaaatcgtgaggtcaggagttcgagaccagcctggttaatatggtgaaaccctgtctctactaaaaatacaaaaattagctggcgtggtggtagatgcctgtggtcacagctactcaggaggctgaggcaggagaatcgcttgaacccaggaggcggaggttgcagtgagccaagatcgtgccactgcactccagcctgggtaacagagggatactccatctccaaaaaaaaaaaaaaaaaaaaacacacataaaaacagattttttaaaattttttgtagagatgaggcctccctatgttgcccagagtggtcttgagctcctaggctcaagtcatccttccatctcagcctcccaaatagctgtgaccataggcacacaataccacgcctggctaattaaataaaatatttttgttttttagagatagggtcttgctgtgttgtccaggctagtgttgaactcctggcctcaagcgagccttgtgagatccagcctcccaacgtgctgtgattatagacgtgaactaccacgcccagacatattgtctttcttatagcagttagggtcctgtctcagggccagaggggtcaccagggaggagatatggagaaacctttcactctcattaaatcagacactgctttgaaatcggatgaaagccacaggccctctcttcagaagatgcttatacctgcaagttgggcgtatcacttcggggacgtgtgggcttcccagagtcgcatctgttcactcctcctccctgaaaaggagagagaggagaggacaagcgtaaggaaggaaccttagcacttaagggatgggaaggaggaaaggccccagaggaaccctgtgtgaccatcaggaataaagtccaggcctggtgtctgaggccctcattctaggtctcgtctgcctatcccttggtccccttcactgggcaggagtcaggagtgtgatgtttctggaggcctcttcctgcttcgcagtttgtgattacctgggccaagtcccacacgtttacagtgcacgcaggtcagtaagagggtagggaagtcaccattcactgaccacttacctgtcagtcaggattcttggctgtaactgacagaaacccaacccagctggcttaagcaaaaaggagaatttctggctgggcacggtggctcatgcctgtaatcccagcactttgggaggccgaggcgagtggatcacgaggtcaggagatcgagactgtcctggctaacacagtaaaaccccgtttttactaaaacacaaaaaattagccgggcttggtggcgggcgcctgtagtctcagctacttgggaggctgaggcaggagaatggtgtgaacccgggagacagagcttgcagtgagctgagatcgtggcacggcactgcagcctgggtgacaaagcgagactctgtctcaaaaaaaaaaaaaaggaatttcctggctcacttgagtgaaaactgtaggggctgtcttcaggctgggctggatctaggtgctcacaaaatggcatcagccatttctcactcaatttttcagctgggttcacttcagtctcttgccttgtgtagatggtcacaggcagctcgtggattatcttctgccataaaatgcccagaaagaagggagtgtctttgccccaagaattgagaatcaggccctgtacccctccctgagccagtcactgagactgatgggcctgggctaaggcctcacttctgccagaaccagggacaactccacctaagtctcacagattgggaaagggaaaggttggttttccagaggaaaatcaggcgctatcaccagaagagaggctggtgctagacagacaaaaatgggagactgaggcagcctactgggggctcagcagattcttcagtcctcccagctccctgaggacgagatgatggttctttttatagaggaggaaaccaagactcagagaagttcagtctcctgtccagggtcacacagctagtcagtagttgatccacgatttgaacccaagtaagtggtagatgcaggatttgaacccaagtctttctgaccctaaagatcagaaagatgatttgggtaggggcgagggagctcagcttgttcagggccaggtgggctgggagagtgtccttgggcaggtgaggttgaagcagccaccggaatagaaggctgggctgtggcccaggagaatcaggagccatggaggtggtggaggggctgggggtctaataatgtcattggggtctctattcccctaggccgagcagcgcctcccagtggtcggtactcacatgtagctgcggtgcttggtggcagcgtcctgttggtggctggggggtacagcggccggccccgtggggacttgatggcgtacaaggtgcccccctttgtgttccaggcacctgcccctgacgtgagcactggggtgacagggaaagggtggctggggggaggaggtagcagggtttccacaggtgaggggaaaggcaggaggggatccctgggagaaggagtggggatccctaggaccatgagagaagggaaggaggtccctggggcagaggaaagaggagctagaggtccctgggcctgggggaggaatggatgggcatgctgagcactcagggtcctctgggatagctaaagcaagcggggacttgggaggccggcccaggtctgagaggcctcctcctccgtccccttgcctccccctctgtccccttgcctccctgcagtaccacttggactactgctccatgtacacagaccacagcgtctgctcccgggacccggaatgcagttggtgccaaggagcctgccaagctgcaccccctcctgggacccccttgggggctgtgagtgacagccctagaccctctgttccctagcatagagacctgccctcagtgtctccctctgcctaaccagatggacaagaactttccctcaactgggagacttgttttcatgccggagatcctccttcctgattcctgactgcggagccctgaacctttgcctatcccacccagcccgacccttttgagcccgtgaccccatccccgcatcccccgtcctctggatctcccacattccaagtcaactccccgttcttcagttttttcgccctttccatcgcaggaccctgtatccacagcccttccttcccagatctcttgagctccagttgacagtgagccctttcccctctcctcctcgcagtgtccagccgccagctgcctgggcctgggccgcctcctgggtgactgccaggcctgcctggccttcagcagccccacagcccctccacggggacctggcaccctgggctggtgcgtgcacaatgagagctgcctccctaggcctggtgagtgtccgcagcagtgggccggcaggagggggccagagcactccacactgacccaccggcccccaccccctgtcttctcagagcaggcccgctgccgaggggagcagatctcaggcactgtgggctggtgggggcctgcgcctgtcttcgtcacgtccctggaggcctgcgtcacccagagcttcctgcctggcctgcacttgctcacctttcagcagccgcccaatacctcccagcctgacaaggtgggtaggaggcgtggccctgggtggggtgttgatgatcctgatcctagggtttgttttttctcaaatgcatctttatcactcttatgtttactccaaaactctttacattcaagggtcttattttccttatggactttattttttattttttttgagagggagtcttgctctgtcacccaggctgaagtgcagtggcgcagtctcagctcactgcaacctctgcctcctgggttcaagtgattctcctgcctcagcctcctgagtagccgagattacagatgcccgccactgcgcccagctaatttttgtattttagtagaagacgaagtttcaccatgttggtcaggctggtcttgagctcttgactttaaatgatccgcctgccttggcctcccaaaactctgggattacaggcatgagccgctgtgcctggcctccttatagattttaaaaagaatttttacattgtggtaaaatacacataaaatttttcatcagtgacatttagcacatttacaatattgtgcaatcatcaccactatcttgttacagaacattttcatcaccccagaggacaaccctggactcactaagtagtcactctctattccactcttccccccggtccctggcagctactaatctgttttccatctctggatttgccagttctggacatttcatgtacatggaggcctgtactatgtggccttttgtgtctggcttctttcactcagcgtaatgttttcaaggctcattcattttataacttcatttggaaaggaactctattcctttttatggttgagtaatattccattgtatagatggaccacattttgtttatccattcatcagctgatggacgtttgggctgtttccatcttttgactattgtgaataatgctggtatgagcacttgtgtacacgtttttgtttgaacatctgttttcaattcttgtggctgtatacctaggagcagaattgctgggttatatgttaattccatattcatcttattgaggaatgtccaaactgttttccacagtacctctttattgattttttgttgttgttgttgagacagagtctctctctctgtcgcccaggctggagtgcagtggcacgatcttggctcactgcaacctgcagctcccgggttcaagtgattctcctgcctcagcctgctgagtagctggaactacaggcacttgccaccacactcggctaattttttgtatttttagtagagatggggtttcactgtgttagccagcatggtctcgatctcctgacctcatgatctgcctgcctcagcctcccaaagtgctgggattacaggcatgagccaccatgcccggcctctttattgattttaaaaatagctcatatattcacatggttcaaaaatcacagtgacatcaaaagtcattggggctgggcacggtggctcacgcctgtaattccggccgaggtgggcggatctcttgaggtcaggagtttgagaccagcctggccaacatggtgaaaccctgtctctactaaaactacaaaaattagccgggcgtgatgtcgggtgcctgtaatcccagcactttgggaggctaaggtgggaggatcacttgaggtcaggagtttgagatcagcctggccaacattacgaaatcccatctctactaaaaatacaaaaattagctgctcatggtgatgcgtgcctgtagtcccagctacctgggaggctgagggaggagtatctcttgagcctgggaggcagaggttacagtgacccaagatcacgccactgcattgcagcctgggcaacagagtgagactccattttaattaaaaataaataaataaataaaaggctgggcacggtggctcacgccggtaatcccagcactttgtgaggccaaggcaggcggattacaaggtcaggagagcgagaccgtcctggctaacacagtgaagccctgtctctaataaaaatacaaaaaaattagctgggtgtggtggtgagcacctgtagtcccagctactcaggagtctgaagcaggagaatggcgtgaacccgagaggtggagcttgcagtcagctgagatcatgtcactgcactccagcctgggtgacagagagagactctgtctcaaaaaaaaaaaaaaaaaaaaagaaaaagaaaaagaaaaaaaagtcactaaatggacagtctctctcatttaccccactccctaccccttaagtggtccaaaattatctagctccagcatggctgcaacttaaggccaccatacctccctggaagatccatttgggtttctttgatcttattccagaatttacctattcagatgcaagtaagcatgacatcatatcatttttctttctcactaaactaatatactatgaacattatacgactgcttcctttttttcttcctggcaagcttcccataacagaacttaagaaacactctcattctttttttttttttttttttgagatggagtctctctctatcgcccaggctggagtgcagtggcaagcgatttcagctcactgcaaccctgcctcccgggcttaagtgatcttcccaccttagcctcccaagtagctgggattacaaacatgcaccaccatgcctggctgttttttgtattttttttgtttgttttgagacggagttttgctcttgttgcacaggctggagtgcaatggcgcaatctcggctcagtgcaacctctgcctcccgggtttgaacgattctcctgcctcaggctcccaagtagctgggattacaagtgcacgctaccactcccggctaattttttgtatttagtagagatggggtttcaccatgttggtcaggctggtcttgaactcctgacctcaagtgatctgcccacctcggcctcccaaagtgcccgccgtgcccagccttcattcttctttttttttttaagttgtataatattccatttacatttgtagtttatttaaatagcctcccactggtgaacacttggactgttccactcttctgctattacaaaatcacacaccaggaaaataaatcttgcactttgtctgccactttgaatattagatctgggctttgaagtgcttagctggaaaggtgaggagttggataagaagacactgaagtgtccagtcctggagttttaatgtgagatggaaatggctagaggccaggggtaaaggtgggctctgggaccctgtcgtctattgtctgaatttaggtcttgcctcttttcccagagtgacctttgacaagccacctaacccctgtccctctgcctcagtctctcatttggtaaaatggggaagaaggttgggttgaccagtcttttctggctctgatgtggcctgtgagtccagaaagggactcacacatacacccatccctggtggcacaggtctcaattgtccgcagcacgaccatcaccctaacacccagcgcagagacagatgtgtccctggtctaccgtggcttcatctacccaatgctgcctggagggccaggtggaccaggggctgaggacgtggccgtgtggacgcgggcccagcgcctacacgtcctggcccggatggcccgtggccctgacacggagaacatggtgaggccgcctgggacattcagggggttgtttatggtaaatagggagttaggggtgtggtatagagcatctgtggtgatttgaaggttctggggaagggctggggagaaattagaggcaggagatggattttttgtgtgtgtgtaagacagagtctcactctgttgtccaggctggagtgcagtggcgcgatctcggctcactgctaccttcacctcccaggttcaagcaattcttctgcctcagcctcccacgtagctgggattacagatgtgcatcagcactcctggctaatttttttgcattttaagtaaagatgggttttcaccatgttggccaggctggtttggaactcctgacctcagatgatccgccaccttggcctcccaaagtgctgggattacaggcgtaagccactgcgcctggctgggaatggatctttcgtagaggagggagggtgctgaggttttcaattgtgagcagaatttgagggaaactttgaagcaggtgaggaaggtctgagtcagacttgaaaggcccctgaaggctgggcatggaggtgtacacctgtaatcccagccctttgggaggtaggggcaggtggattgcctgaacccagaagtttgggactagcctgggaaacatggcgagacatcatctctccaaaaaatacaaaaattagctggccatggtagcatgcacctgtagtcccagctatttgggaggctgaggtgggaggatcacttgaacctgggaagttgaggctgcagtgagccatgatcgcatcactgcacttcagcctgagtgatggaatgagaccctgtctcaagaaaaaaaaaaaaaaaaaagcccctgaggaggagggtccctgggggtctcacctctgaggttctcaggatctaaggagctctgaggccctcttcttaggagggggtggggtacagggtgggtttggaggtatcaggggtctgaggaaggaatgggaagggttctgaggcccctgcctatcactcacacctaccccaggaggaggtggggcgctgggtggctcatcaggagaaggagacgcggcggctgcagcgccctgggtctgctcgcctcttccctctgcctgggcgggaccacaagtatgcagtagagatccagggccagctcaatggctcggcaggccctgggcacagcgagctaactctgctgtgggatcggactggtgtgccaggaggcagcgtgagtacccaggacctacctccaaccctagccgcaggccccagcctcagatcacctgggctttctgaaccccaggccacaaactctgaaatccctagattctggcctcggactccttaactcttggcctctgaactctggacctcctcttgaaccctgtggcccctgacctctgcctatagaccctaacctgatcccatattttgacccccatcttctgactcctcacccttgaccctgctgaccctgacctctgccctccatactttgacctataataatctccagattcctccagaccttggacctctttactgatttcctaaatcctgacttcctatgtgcctgagttctcaacctgggctccaaacccttactttcagttagcgccagactctgacccctgccccagaccttgactgctgccttcctgtgaccccttccccaggagatctccttcttcttcctggagccctaccgctcgtcgtcctgcacctcctattcttcctgcctgggctgcttggcagaccagggctgtggctggtgcctgaccagtgccacctgccacctgcgccagggcggagcccattgcggggatgacggggctggtgggtccctgctggtgctggtgcctaccctctgcccactctgcgaggagcatcgggactgccacgcctgcacccaggtgcctgtggggccaccaggggaggtcacaaggtggagggagccacagcaggcaatgggcagtcaagggaacccctggtggggggtgtgggggaaacagcaagggcttttggccttgatctgcagagcctggtggggagggtgagatggagctgtagagagaggcacctggggagtcaggactctccctgttgtaggggccagagaatgcaactccatccttttccactagcggggagtttctcagcataggcactggagcccaggagtaggccttcaggcctgccacctccaagtgatgtcaggcagccctcgacaccctgcttcctcttgttccctgggagggtttgtttccttgtgagtggcaagggagccgttaagggtccaggctctaagtccctgctctgtctcaaacagagtgaggcttcctatttctctccccccaccccaccaccatccaggagctcaacagaagtcccagaattgcacttctgtggctctggttgggccttgtacaggctcctgggccaatgactggagttgtggggagggaatgtggccccttgcccacctctggatcctgaggattgaataagccccacccggaccacacagaaggggtgctattgcctaaaggagacagtgggtgctgggcgggccgacccatgggtgtctgtggtcgaagggaggggtccagagacgcaggcagctggggagggagatggccttacagggacagtctgcagggtggggcagggggtgggatgggcactgggagtccaaaggaaagggctgagtggggttctgactcctctgcccaactgacccccaggaccccttctgtgagtggcatcagagcaccagccgcaaaggggacgcggcatgcagccggcggggccggggtcggggtgccctgaagagtccagaggagtgtcccccgctctgcagccagtgagtcaggctgggtgcagggagtgggtgggtggatgtgcctggggatgtgtgctggctgtggagtgacctggccccctgctccccaccccaggcgactgacctgtgaggactgcctggccaactctagccagtgcgcctggtgccagtccacccacacctgcttcctgtttgctgcctacttggcccggtacccacacgggggctgtcgaggctgggacgacaggtatggtccctggggcagggctaacagaggaagattccccaccggcaaggggctggggctctgacccccacccctgccatcctgcagtgtacactcggagccacggtgccggagctgcgatggcttcctgacctgccatgagtgtctgcagagccacgagtgtggctggtgtggcaatgaggacaaccccacactgggacggtgagcccgggcaggtgggtgggcagggtgcccggctgtgtccttcctccatgaccggtcattctaatggcctctttgcttctctgccctcttgcccatcccatggccaccttcccttttccgtactgtttttctgttgtttattttaccctcccgctcttttttctccatttttcctccttttccggctctctgcgattcgttttctttctccttgtctgtttctgtctctccgctctccctttcactgcatctctgtctatgtctctcttctgtcttccaaaattgtttttgtctgcgacttctcctggtttctctgtctctctttccaaatttgtatttgcatccctctccttccaattggcctcctctctccctgtcattgtttctatgtatggctcctgtttctatgttgtcccccgcttcttcactctcccaccctgcaggtgcctacagggggacttctcagggcccctcggtgggggtaactgctccctgtgggtgggggagggcctggggcttcccgtggccctccctgcccgctgggcatacgcccgctgtcctgacgtggatgagtgtcgcctgggcctggcccggtgccacccgcgggcgacctgcctgaacacgcccctcagctacgagtgtcactgccagcggggctaccagggtgatggcatctcacactgcaaccgcacgtgagtgaggcgggggttgctatggagatgttgccccaggctggggcacatggaggtggagggaggaagccatcatggcgctgggtcccctcctgtggaaccagcatccccagttagccaggggtttttaccttgcacactaggtccttattagagtgacagggtccccagtgtaaccctggttaccatggaaatggggcacccataggctgtgggccatagtcttcagcgttgccatggaggcggaggaggacctagttgaaagaggttttcacagtggtgctatgtggttgctatagagacaggcttggtgatgcatggagttaccttggagacagggtcacccacatagcccaaaaccatggaaacagccagtggctttgatggtgtcatggtgggtggagatgatggggtgctttaggggctctgggcctgcctggcgctttccccacccccaacacggcccctcaggtgcttggaggactgtggccatggtgtgtgcagtggccccccggactttacctgcgtgtgtgacctaggctggacatcagacctgccccctcccacacccgccccgggtccgccagccccccgctgctcccgggactgtggctgcagcttccacagccactgccgcaagcggggccctggcttctgcgacgagtgccagggtaagcagcccttgtcctgggcccagcctggacccagggagcctcctcccttcttggggctccagtttgctcttcttggagggggcctcagtgtcctctcatgcagctctaggtcccctgccccattcctgttcctgactcaaacaggtttcagtgccacccgtcactctggttgggcttcagttccccctcttgggacttgctgtttcccctgatctgggccttggtttctcacctttgaagcggctgggtggggtcagggtttagctgagccagtaggcctgggcctgtttccacccttgacttgactctgtcccacctgctggggcctccacagactggacatggggggagcactgcgaacgatgccggcccggcagcttcggcaacgccacaggctctaggggctgccggccctgccagtgcaacgggcacggggacccacgccgtggccactgcgacaacctcagtgggctctgcttctgccaggaccacaccgagggtgcccactgccagctctgctccccaggctattatggggatccccggtgagccaacgggccagccagggctgggtagggtgtgcttggggacacagtggggagggtcaggactggtctgacactggctcttctccatctccccagggccggtggttcctgctttcgggagtgtgggggtcgcgccctcctcaccaacgtgtcctcagtggcactgggctcacgccgggtcggggggctgctgcctccaggtggcggggctgcaagagccgggcctggcctgtcctactgtgtgtgggttgtctcggccactgaggagctacagccctgtgctcccgggaccctctgtcccccactcaccctcaccttctcccccgacagcagcaccccctgcacggtgagcactgaggaaacgagggttcaggcgcatgagccagaaccgtgtcccctgacccagcctgcatcctcagaccctgaccctagtattgctgtttttttttttttgtttttttaatccttcaaaacccaaactcctcctcagatccccagcactttgttcctaggcccacagacagacccccccatttcccagatagcttcctatttcctcagctcccatctccaattctccagattctcaatctccccattcctagagcaggaatggtaaattgttacaccttgtacaccaactctgattgattggtactgactgccaggagctgcatgttgagaaaggggctcaatgcaagagtgcctgatagatgagccgtgtctactttggacacaggaaggggagtggtggccttatgccatagtttgacagtctcccctggatgttcaaacagcccatttcccagtctcagattgccctcccctcttgaacccctcctcctcccagaccccaggtgtcgttctcatcctcattgtctcctaatcctcgattctgcacccctctagctgagctacgtcctggcgtttgatggattcccacgcttcctggacactggtgttgtccagtcggaccgcagcctcatagctgccttctgcggccagcgacgggacaggcccctcactgttcaggccctgtctggtacgggggctaggggaagtgggacctcttagtcctgggctatgtatcccttgcccctgaactcaccacctgaagtgggctcaggacccagctctgccgctgcttatggggtgatgtagtccctcaccatctctggacctcagtgtccttagttgagaggaaaataggattgcgccggctgagctacgtctgcagagagaagggctgaatgagacatgtctctggggcatatagaatgtggttggtgtgaggatcccacaccactcactctttccagctaggcaggagtgtagtagcgcaatctcagctcactgcaacttctgcctcctgggctccagcgattctcctgcctcagcctcccgagtagctgggattacaggcgcatgccaccatgcctggctaatttttgtatttttagtagagacagggtttcaccatgttggccagtctggtcttgaactcctgacctcaagtgattcgcccaccttggcctcccaaaatgctgggattacagacataagctgctgcgcccggcatatatatatatataactttattgaggcatattttatatatactaacatatcaagtaattcctgtcacacctacccccaaatcagtatcttttctaaagagatccagtctcatgtaagggcagtaggagttgtggaaggtttggagcttgctgattacagggcccaattcacgttttgaggatcgctgggccaccatgagtggggagtgtaggcagccaggatgaccagtaggggatgggtgccggtgtccaggtgggacaggacttgggcttggatagcagctcaggaggtagctagcagtcggtgagagatttaggcttgaagatcaatcttgatgggttggctgagggagggggtgcagaatggttcatcctggcgatgattatgaataatatggtgccttccttccctgcccagtcacactgggttttcttagcatctgggggtggaaggggccaggaacgtgactttgctaccagcctctggcctctctcttcacagggctgctcgtgctgcactgggaggccaatggctcctcatcctggggcttcaatgcttcggtgggctctgcccgctgtgggtcagggggccccgggagctgtcccgtcccccaggaatgcgtgccccaggacggtgctgcaggtgcggggctctgccgatgtcctcagggctgggctggcccacactgccgcatggctctgtgtcctgagaactgcaatgcccacactggggcaggaacttgtaaccaggtacaggtgggagagggcaagtctggtgggacagggctggtgatcagggctcccctgagtcccttgtcatcccccagagcctgggtgtgtgcatctgtgccgagggcttcgggggccccgactgcgccaccaagctggatggcgggcagctggtctgggagaccctcatggacagccgcctctcagccgtgagttgtgggtacccgctgtctagggatggttgctcccaggtcgttctcccacctccattcctgggaccacccctacacccaggcctggcactttgtcctgaccctagcctgatccccaatgtccgcacccacccctaggacactgccagccgcttcctgcaccgcctgggccacaccatggtggatggacccgatgccaccttgtggatgtttgggggcctgggcctgccccaggggctgctgggaaacctgtacaggtgaggactgccctgggcaggtgggattcgcaaataagagaaggtcacctcgggatgctaagagtcacctcagaggagtgcagaaaagcctctaaggtaaaggacagcccaaaggatgctgggacacttgtcacaggaagctcacccggggacacttggggaccagggtacttatttgggtggtgctactccagggaatggcaagaggactgtcataggaaggtcaccccaggggatgcggggacatctgtcaggcagggtcaccttgaaggatgctgggatgactgtaatgaggctgcttttttgcaccctggccccaggtactcagtgagtgagcggcggtggacacagatgctggcgggagccgaggacgggggcccaggcccatcgccccgctccttccatgcagccgcatatgtgcccgctggccgtggtgccatgtatctgctggggggacttaccgctggaggcgtcacccgtgatttctgggtcctcaacctcaccaccctgcaatggcggcaggagaaggtgagcatctctccccagcccactccccagccctcacactgggccctgacagagacagctgtggtagctcctgccagctccatccccagaggaaacagaagccccaaacttgaatttcctcggccatcctgggtcacactgttgtcctgagccagtcctgggctgggacacagcttcactcagcagcagagagaggccaggggagcaagggcttcccaaagccacaccaggcttgagcaggtggaaatgccaaggggcccactgtgcctctgccaggacccaggctggtccgactggccctgggggggtcattccctccttagtacttcagggaggactgtggggggctgaggctcgcttctacccacaaggtgacccctgacctctagccccatcggtgaccttgcccctccatccctcaggccccccagaccgtggagctgccagccgttgctggtcacacccttactgcccgccgaggcctgtctctgctcctggtgggcggttactccccggaaaatggcttcaaccagcagctgctggagtaccagctggcaaccggcacctgggtgtcaggagcccagagtgggacaccccccacaggtggggctggggaccgggaggggacagcccccgtggacctcccgggcatctgggcttcctgtgggctctccatccactgctgtgctctgtggccacctgtctccctctctttcccatccccatgcagattctcagggcaccctcttgaatgttcagattttctgactgtccttcccagactccacaactaactgcccactcccggccacatgtggccaccgtcccctgcccccagggtctgagctccctgcttctcaagggttcttcctcgatcacacctcctttctttgatcactgtcccctagacattctggacgccctgtctccctcccgagagcctggcagaacttactgccagttgaggactcccttctctttcccagagtctctaatgattgtccatttgaacccaactgagagggacgggtggagaggggctcccaggcctccagtctcagggccggggaagggagtggtcaccgaacaggggaccgggaggtcggcggggtcagtgctgttgtcagcccctcccccagcctgtcaccctgcccctcaccaggtctctatggtcactctgctgtctaccacgaggccaccgactccctctacgtgtttggggggttccgattccatgtggagctggcggccccatcccccgagctctactccctgcactgtcctgaccgcacctggagtctgctggccccttctcagggggcaaaggtcaggaaaagaggctcagacccaaggatgtatggggcaggagggaggggtcctctttcccagtgccccagggactggctccatcccagattcctgcttcccctcctttctatgttccctaactaagcgacacccccacatctcccccgcttccatccctgatttggaggagagaacccgaggccaggaggtcagaggcatgagttctgcccagctctcccctgagtcttggtgcggccctggcaggccccttccccgtcctgggtttttccactcgtataaaccaggactgaggctccccgctctttctgccttcaaggccaaggagaatgtgtgtgggagggcagggagccctgtctgcactggttagagaggctggtggtttcagtccacacgtttccaagcccgtcttggaggcagggggctagaagcaagagactcgaggagcctcaaccccaggacgcccccactgtcactagcgagatcgtatgaggaatgtgcgtggctcatctcggggtctgggccaagttcctggggagcagcctgggtcatgggggttccgggaagtcaggaagaagatggctctgtgggctgctcttgctggtacaggaggtttcctggaggaaatctcacctcacctgaaggaggtgagatttgaagagggttaggattgggtgggctggtagggggggataggtagggaagtacaggggtggctggagggctaagagggagcagaggacagctctgacaggctgtcctgtccccccaccccccgtctccccaacagccccgcccccggcttttccacgcctcagccctgttaggggacaccatggtggttcttggggggcgctcggaccctgacgagttcagcagcgacgttctgctctaccaggtcaactgcaatgcctggcttctgcccgacctcacccgtaagtccccattgtggctcccaggaggctgagggacatccaggaggagccccatccccatcctgggactcccactccttaggagtcactgggcccctgcagacccactggcagagctcccgctcttctggattatctgaacaccaggacatgccctccttccttttttttttcttagagaagtttattttttactctgtaaaagtaacaatgttcactatatataatttgtaaaataggaaagaaaaaaaaacacccataatccctctctctagagacaaccactattagacatgggggtgtttcctaccagtctttgctgttcataggtagaagcatgcctgtcacttgcctttttatttcaatgttgtgagtgactgttgtgagtgtgtttctgggactgtctccttttctttttgcttctctctctgaccctttgtctctttttctatttttattagcaacagggtctcactgtgttgcctaggctggagtgcagtgatgctatcttggctcactgtagcctctgcctccaaggctcaagcaagcaatcctccctcctcagcctcccaagaagctgggactacaggcatgccaccacgcctggataattttttttttttttttttttttgtagagacagggttttgctatgttgcccacgctggtcttgaactcctgggcccaagcagtccacctgcctcagcctcccaaagtgctgggatttaattccctttttctcttaatctgtcttttcagattcagtagacagagactacttcatgtctgtgtctctcagttattttttgaggatttaaaaaaattgaggtgaaagtcacataacataaaattaaccatcttaaaaatacattggctgcagcctgggtgacagagcaagactctttctcaaaaaaaaaaaaaaaaagcattggcatttagtgccttcagagagttgtccagccgccacatctatctggttcgaaaacatttgtctctcttcttatttccctctttgtgttcctttgttgtctgcttgtgtctctctccctctctttttttttgcttgctgtctatcctcatgtgtttcctctctgcttctgctgtttttttttttttttttggagacatggtcttgttctgttgcccaggctggagtgcagtggtgcaatctcagctcactgcaacctcaacctcctgggctcaagtgatcctcctaatttagcttcccaagtagctggggccacaggtgcgcaccaccatgcccagctaattttttattgtttgtagagacggggtctttctacgttgcccaggctggtcttaaactcctgggctcaagcagtcttcctgcctcagcctcccaaagtgttgggatcacaggtgtgagccaccgcccttggccttgtttctgctgtcctttgaccctgtgtttctcctctttccctgcatccttctctgactggcatcatggtgtgggtctcttcctggagtctcctgctctctatctgtctgaatacaccatctttcctcaggctcggcctctgtggggcccccaatggaggagtctgtggcccatgctgtggcagcagtcgggagccgcctgtatatctctgggggtttcgggggagtggccctgggccgcctgctggcactgaccctgccccctgacccctgccgcctgctgtcctcacctgaagcttgtaaccagtctggggcctgcacctggtgccatggggcctgcttgtccggggatcaggcccacaggtaaccatggcgaccatgacaggcagtggggagtggagccctctaatgggggtcctgtgctaggccacaccaggatggaggcctcaggagtataccgtctggttcaggaaaggggtgaatcaccgcaggcagggtggccgggggagctctgagtggggatccctgcctgggactggggtctcatgcaagaatgcttgctggaggagctgggtctgaactgggccttaaaagaacggtagagttgagaccatcagtgattcagaagtgaggctgagaccggaagctggagggggtcagctcagaaagggcttcccatgcctggcagaggcactggctctgtccagctccacagatccttcagctgcggttccaggaatgcagacatcctggacactgaaagtgttttcttaggcttagcacagactcacttcgctgcccagtcaccctcactgatatgaggctattagttggccttatttgcccgaagggtgtgttgtcagttactacaggaatgttaatggtttgatttcggagtgctccttaccccagaccccactggaggtattgtgtaacagtgggtacacccactgcttttctaaaatccagaacagtctgaaacgtgtgtacctcttgggatttggggtaagggattgtggaccccccctgtgcaggacagggagccatggaaggcctgagcaggacagggcagggacgggcctgggcagtgagatccctggcgctgttgtgaggggtagagtgacgagagcctgcaggtggggaccaggttgggcaaggggctgcaggggtggggaggaggggacggtcagggagaaatccaggaggcagaaggcttcggtggctgcatgggcaggaggacctggggtgtggtccagcgtctccagcctgggtgacaggtggatgtgggaccatctattaccaaatggtggtggggacagccaggctcaggaggcctgtgctatgtccagcttgggatgcagggttgggggcctgcaggacagtgtctgggaggcagaaggagggggtctggatgggtgtgagtgagccaggcctcatgtcctttaggctgggctgcgggggctccccctgctccccaatgcctcgctccccggaggaatgtcgacgtctccggacctgcagtgagtgcctggcccgccatcctcggaccctgcaacctggagatggagaggtgagtggtggggaaggcagggatgagaagcagcaggtgtagggcagggaggtcctggtctccactctggtcagctgtcccacccaccccagggtctcaggaaccaccgagttctcagctggctcaggaggggtgctgagggtcccatctagcctgtcttccctcaccaggcgtccaccccccgctgtaagtggtgtaccaactgccccgaaggtgcttgcattggacgcaatgggtcctgcacctctgagaatgactgtcggatcaaccagcgagaggtcttctgggcagggaactgctccgaggctgcgtgcggggctgctgactgcgagcagtgcacgcgggagggcaagtgcatgtggacgcggcagttcaagaggacaggtgagcagtgggcctagttcctgagaggggagtcttggggcctggactcctgggtctgagggaggaggggctgggggcctggtctcctgggtctgagggaggaggggctgggggcctggactcctgggtctgagggagaaggggctgggcccctgatctcctgggtctgagggaggagggactggggcctggactcctgggtctgagggaggagaggctggggcctggactcctgggtctgagggaggaggggctgggggcctggactcctgggtctgagggaggaggggctgggcacctgatctcttgggtctgagggaggaggggctggggctggattcctgggttaagggaggaggggctgggcctgagctcctgggtctgagggaggaggggctgggcttgcgatctcctgggtctgaggttctaatccccgtgccccacccccaggggagacccgccgcatcctctccgtgcagcccacctatgactggacgtgcttcagccactctctgctgaatgtgtcccccatgccggtggaatcatcacccccactgccctgccccaccccttgtcacctcctacccaactgtacctcctgcctggactctaagggagcagatgggggctggcagcactgtgtttggagcagcagcctgcagcaggtactgcacctggccaggaccgtgccaggcaagggcccgggcaggtctccctcctctctgcgctggcagggacctttcttccaccatctcctccaccctcctccttccatctccctggctctagctgcagtcgtgcttccttctcgtgccaccatctctttcctccctcgttgcctcatgagggtccctgttgtgtcctccagccatgcttctgtgtgtgccactttcccaacccctggcctctgcctctccaactcttgtccatggtatcatggtctcctcatcctttccatgactttaaaaaaattttaatttaattttttgtttttaattttgtcgatataattcataggttcacatccacgactcttaatgcttcttccttcaacctcccaaaccttttctgcttccctcctctctctctttctctctctacttatggaacttttggttataagaaacagacactccctcgagctggttttgttataaggaagtgtgggtatttgatggactctgagagcaggaagtgtttctgctctgttgctctcaggccacatgacccgtaatctcagctgttctccacacttctccattgtcgggtttctgtcggtctgatagtcaacacacatggcctcagattgcagccttgactcccagtctagatgccttctaattccagagaccacgttcatctctgtgtttgtcggttagctcacattctcgaggagaaactctgacttagtgcacgagctacatgtccagccttggtgtagtgggatgtggccagggagggctaggagcacgtggttcaaacgtggcacgtcagatctaggcctcttctaggctgtggggtggagagatgattcctgaaggtgggtgtggcctaggcaggcatgtgtgtacccgtgacagtccaccccttggagtgcctggcacatgctctcttgtttccagaaactccattccaaagacgcttccacctgacatgattaaactgtcgtggtggcagacaaaggcattcgcaccccaccccactgcccccccgtgggagataagacacattcacctcccactgtcacatgtggaagcaatgtcactcagccagagcccactcctcattcatacctcgattatgcaagacccaattgaggcaaaactgctcaccatccgacaacccatgaactaagtgatcagtccagccaccacccagacactagtagacaacagtgcagggatgtgggacacttgccattttgagaggtggactaaagaaaccaacagcacttcgtggaaattcgagaccaggagggcagggtgtggaggaccaagaatcccacagaccttggcatccagtgccaggagccctgcctgggagtggtacattagctctcacccggaggtagtttgccttgcgatcaaaagctcaggctgtgaagtcagtgggatctgggtttgactccaacttggccacttcctggctgtttgactttggatgagtgacttcccctctccaagacctcagggagagtttgctaaaatgggaatcatttcactagatcctgtcccctagggaggttgtaccagttaaatgggggagaatttacttagagcatagagcaatgcctgccattcaggaagcactaaaaaatggctaatgatcatgatcattgttactgtaatgagcagtggtgagagggccaatctggctgacccaagtcctgccactgggaggattcccagtctccactgtatgggacacaccaagagggtggctgcgggagttccccatgggggctgtcaatgtggccagaagggcagaagcccctgtgattttggtctgtggtaagcagaggcctctcgtctccaagcctgggatcctaatggtagtatgggttctccccagatattattgaaatttccatcatttatctttgtgggagctccagggagcagaaggcatacccacagtcctgcgggcatgcgctgttcccccagcctctcggtgcttgccaagttctcacacgcctgaagagctggggcagctaaggagatgggggagtggccaggagggtggcaaggggaagaggtggggccagtgaattggagagcacagcctgtccccaggggccagatgagcattgttgatggtgtatgtgaatgtgagaggggacttttaccagactttctatgaaacctcctagctttaaagtgatggcttagctgggtggggtggctcaggcctgtaatcccaacacttcaagaagctgagacagattgattacttgaggccaggagttcgagacctgcctgggcaacatagcaagaccctcatctctacaaaaaaaaaaaaaaaaaaattagccaggcatagtggtgtgtgtctgtagtcccagctacttgggaggctgaggtgggaggatcacttgtgtctgggaggttgagactgcagtgagccattattacagcactgcactccagcctgggtgacagagcgagaccccgtctctaaaaaaaaaaaaaaaaaaaaaaaaaattaggccaggtgcagtggctcacacctgtaatcccagcactttgggaggctgaggtgggtggatcgtgaggtcaggagttcaagaccagcttgaccaatatggtgaaaccctgtctctactaaaaatacaaaaattaaccaggcatggtggcaggtgcctgtaatcccagctactcgggaggctgaggcaggagagtcgcttgaacctgggtggcagaggttgcagtgaactgagatcgcaccactgtactccagcctgggtgacagagtgagactccgtctaaagaaaaaaaaagaagtgttggcttagattccaccgcacaaatcaaacataataggcgtgcaggtgatacctgttatgatttggctcaagggctgcctgattctaaccatcccgcattgttctttttttctttttttgaaacagagtctcgctctgtcgcccaggctgtagtgcagtggcatgatctcggctcactgcagtctccaccttccaggttcaagtgattatcctgcttcagcctcccaagcatctgggactatagatgcacgccaccacacctggctaatttttgtatttttagtagagactgggtgtcaccatattggccaggctggtctcgaactcctgactttgtgatccacctgcctcggcctcccaaagtgctgggattacaggcatgagccaccacgcctggcccagcattgttctttttaatggctttggcctgtgagtctggggcaggcagcggagacactccttctctggtctgcctccttcctctcatcctccctccctctcttcagcgaatttatcattgagcaccttctttctgctgggtgctttgctaggcagtggggaatgtcagcagatgagctagagtcctgctctcagaacttatgttcatacaccttttccatgaactcaggaaatgcagtgtatggtgttgggcatctttgcatttggtcactagggagattacagcagaaagtgctgtccaggactgaggattcagggttctctacccctcccagattgtcccaccatctgccaacaagtgccctaaatttagatctggaagcccagcccagcagagaatttgcctctggcagttcagcaagtctcagtgatttgcaggcccctcagtgggctcagagctccagccacagcagtcagggttttctatttcaggattccatggttgctttgccttttcctaagtgctttcaggcagccggcccaaattaacctctttcctcttattcttcacttatggcccaagcaataaataaagtgccttatacactgaggtaagttcccaagagcctgaatctcattgtgcacgtttttggggtcctgacatacaaatatggcttgtgagttgctacccagcccctaaccaaggactcttcaggttctcagtgtggggtaagagaagcctttttgcctcagcagccacatttgttctttttcttgtcttttctttctttcttttttttttttttttgagacggagtctcgctctgtcatccaggctggagtgcagtggcgcgatctctgctcactgcaagctccacctcccgggttcacgccattctcctgcctcagcctcctgcgtagctgggactacaggcgcccgccaccacgcctggctaattttttctatttttagtagagacagggtttcaccatgttagccaggatggtgttggtctcctgacctcgtgatccgcccgcctcggcctcccaaagtgctgggattacatttttctaagaaactgtggtttgcaaccccactcctgatactcttttctgtctccttctgggaacattgccattgttcctttacctggaagaaacagaagtgcccttagtgaggaggggaactccctccaccaatgcagtagtacctgttggaacccaggatagaaagtacagcagggcctcacaaggaactggagacagactggaaagctgcctttctatctgtctttagggcacgtggttctcatctctgtctctttctgcagcctgctcttttcctgcctgtctgcgtcctctttatttaatcatcatttgcttatctaaacaatcccttcaacccaagtctacgcgatcttccagtttattttctttttttgagacagagtcttactctgttgtccaggctggagtgcagtggtgcagtcatgactcattgcagcctcaaactcccgggctcaaaaaatcctacctcagccccccaggtagctgggtctacagatgtgtgccaccacacacagctaattttttatattttgtagagatggtgtctcactgtgctgcccaggctggtctggaactcttgggctcaagtgatcctcccactgtagcctcccaaagtattgggattacaggtgtgagccactgcggccaggcaaccttccagtttcaagatcctccccagcctgacttcccgccttggtgtgtagttacaaacgcttgagagggaaaacatgatgaccccagctagtgtccactttgctctacctgtggccagggaggggtgagacctcaaagagggtgtggtctgggaagatacccagaatgtgtttgtttaagcttatttccccatctctctcttccctgcatccccatcccctcccccccatacagtgtctgagcccttcctacctgcccctgcgatgtatggccggaggctgtgggcggctgctccggggacctgagagctgctccctgggctgtgctcaggcaactcagtgcgccttgtgcctgcggcgcccccattgcggctggtgtgcctgggggggccaggatgggggtggccgctgcatggagggtggactcagcggcccccgtgatggtgagagggctttgggcactgggggagaggggctggcccttggttggggtctgatacagtgaacatagggatactgggccagacccagaggtggggctcagaggaggcaggagggagggcctaggcaactggggcaggtggtacagaggtccaggtaaaatgctatatccccggtgctagggctgacatgtgggcgtccgggggcctcctgggccttcctgtcctgcccccctgaggacgagtgtgcaaacgggcaccacgactgcaacgagacgcagaattgccacgaccagccccacggctatgagtgcagctgcaagaccggctataccatggacaagtgaggccgcaggcggcgctggggccaggcaggctagggtgggagagtctgtggggagcagtaatggatgaggcctagagccaagcaggacagaagaaaagaaagctcgaggcatgaaggcagtgggattgattcctgaaggtcaagagtggtgaggctgagcagggaagagtgagtttcatagggtaccccaatggccgggcacagtggctgatgcctgtaatcccagcactttgggaggccgaggcaggtggatcacttaaggccaggagttcgagaccagtccacagggagaccccatctctacaaaaaaataaaaaagaaaatagggtaccctcaaaagaggagagagggttgtgggctacacctggagggggtggtgggctagatcctgaagagaagatagcaacgggacagagcagggatgagcaaccagttgagaagagggtggggtagttggttgggtgctaggccatgaagccacgaggagggtggccacctgccctgacccccactttgcccctgcagcatgacagggctgtgccgccctgtgtgcgcccagggctgcgtgaacggctcatgtgtggagcccgaccactgccgctgccactttggctttgtgggccgcaactgctccacggaatgccgctgcaaccgccacagtgaatgcgctggtgttggggcgcgtgaccactgcttgctctgccgcaaccacaccaaggtgggccgcccggagcctcagacccccgaccctgggacccaggccctcacttgccttcatcccacgctcaggcggctcgcatctcatcctgagccctgataagccagggacagataagccagagccctgtcccagggagatgtgtggagacttgggggacgctgcctgggtttggatcccagagggtctgccctggaatagtggacggagtgggtgctgcgccaggaggacaggcacgtggaggaggatttgagataatggagggaagggcttttgaactcagcactttgggctgcaggtgtgcaagggaaggcgggggctaaatcccgctgggattgtccaaaccaggtacccgagcctctgctgccctcccgtgggctctcagaacctgcccctgtgcccccaacgccctcctacccctgatgactctccagcctctctaactaccctgtcctgggttctcagggcagccactgtgagcagtgcctcccgctgtttgtgggttcagctgtcggaggcgggacctgccggccctgccacgccttttgtcgtggaaatagccacatctgcatctccaggaaggagttacaaatgtccaagggagagccaaagaagtactcactggacccagaggaggtgaaagagaggggtcagatgcctgggtctgagggaggaggggctggggagctcctgggtctgagggaggagggggctggagacctggacccttgggttgagggaggaggggctggaggcctggattcctgggtctgagagagtagaggtgggggtcttgaactcctgggtctgagggaagaggagctggggcctggactcctggatctgagggaggagggggtgggagcctggcctcctgggtctgagggaggagtgggtaggagcctggactcctgggtctgagggaggagggggttggtccaggcctttctatgatcacactgtccttccttggccagattgaaaactgggtgacagagggtcctagtgaagacgaggccgtgtgcgtgaactgccagaataacagctatggggagaaatgcgagagctgcctgcagggctacttcctcctggacgggaagtgcaccaagtaagaggaaccgggggggggggggggggggggggggggggaggccggggatcccacccttctcactgggagtagctctggagccaggccccctctttagtcctccacccccagtcaggagaggatgacatccccagggagcgcccaggctggggtcagggtagggaaggagctggaatgtgatgccactccctacctccaaggctagtgctgaagtgcagtccacagagcggccccatcgagaacaagatggggcggctgagggcagaggccttggaacaacctcccctttccatctccttctttctgagtgttcagtgagtgctggagtctgtgcaactcgggttctaatcccaatggtaatttaactgctttgtggccttgggcaaacagcttgacctctgtgaacctcagtttcctcttctggcctgttgcacagagttgagctcacatatggggtgtccatcctggaccactgcaggccatgggggctccgtaaccctcaacttcttccccagatgccagtgtaatggccacgcggacacatgtaacgagcaggatgggacgggctgtccatgtcagaataacacagagacgggcacatgccagggcagctcccccagtgaccgtcgagactgctacaagtaccaggtgcggctgcagaagctagtggtgggccgagggccctacaccttgtggaggtcagggctgggatgaggtagccaggctcgggcaggactgacaacatggttccaaatcagtggttttgggatcaagtgcagcttgacagactgttcctgagccccattcagttacaggccctaggcagtgatgctggggaccaagatatgagcctctgggggactctcagactggtggggagacagtctccattacaggtagtcacagctaaaggtggcacatgccagaaaatctatcccatggtagctcaaccgaaaaaagaaaatgggctgggcatggttgctcatgtctgtaatcccagaactttgggaggctgaggcgggaggatcacttgagcccgggggttcaagaccagcctgggccatatagtgcaaccccatctctgaaaaaaaatttaaaaattagcctggcatggtggtgcacatctgtggtcccagctacttgggaggtggaagtgggaggattgcttgagcccaggaggtcgaggctgcaggactctgtctcaaaacaacaacaacaacaacaacaacaacaacaacaaacacacacacacacacacacacacaacagaagaaaagaaaatgtattgactcttagaactgagggtctggggtctgccttcaggactggctatatccgggtgctcacacaatgccatcagaagtctctctgcatcttgactctgctttcctctgcattggcttcattttcaggcagattcttcccagttggcagaccccctctgatgaactgaggctagcagagatctcatatcatttaatacccagattcaaattcccctcgagtgcatttccctttttcttctgcacagaggctcctggagtgcctgcactggccacctggctggctgctgtgttccagacttgcctccatgatgtcccaggctccttcctcagaggacaactcccgccacctccccgccaccttctctctccagtcccagagggaagagaaagtcccttgctctcagtcttccttacccatctacagaaacataatagctgcaaacataatagctgccaccccaaatggcaacagttttacaagccttactgacccttaacatttctatcctgggccagaatttctgcttttttattttttttttaatttttaatttaatttaattttttttggacacagagtattgctctgttgcccaggctggagtgcagtggtgggatctttgctcgaggcagcctccacctcctgggttcaagtgattatcctgcctcagcttcctgagtagctgggactacaggcgtgtgccaccatgcctggctaattttctgtattttagtagagatggggtttcaccatgttgcccaggctagtctcaaacttctgagctcaggcaatccacctgccttggccccccaaagtgctgggattacaggcgtgagccaccacacccagcccagagtttctgctttcttgataagggaaaggcctattggcttttaccagggagtctcagagattaaatcagacctcctcctctaccaggtctgttggctgcttagaagtagcagtttttcttggttcctttttttttttgagacggagtctcactctgtcgccaagctggagtgcagtggcgtgatcttggctcactgcaacctccgcctcccaggttcaagcgattctcctgcctcagccccccgagtagctgggactacaggcacgtaccaccaccccccgctaatttttgtatttttagtagagacagggtttcaccatgttggccaggatggtcttgatctcttaaccttgtgatctgcccaccttggccttccagagtgctgggatcacaggcgtgagccaccacccccggccggttcttttttttaatgtatttatttttaagacagggtctggctctttcacccaggctagagtgcagtggtgcaatctcagctcattgcaacctctgcctccctggtttccatcatcctcccacctcagcctcctgagtagctgagactacaagcatgtgctatcatacctggctaattttttttttagagatggggttttaaccatgttgcccaggctagtcttgaactcctgagctcaagcaatccactcaccttggcttctcaaagtgttgggattctaggcgtgagccaccgtgcctggttgggcttttgggtttttttttttttttttttttttttgatacagggcttactctgtcacccaggctagagtataatggcgcaatcatagttcactgcagccttgaactcctgagctcaagtgatcctcctgcctcagcctcctgagtaactgtaactataggcacacaccaccatgcctggctaattttaaaaaaattttaaagacgggggtcttactatgttgcccagactggtctcgaactcctgggctcaagcggcactcctgcctcagcctcctgaagcactgggattacaggcatgagtcactgcgtctgttttctcttggttctaatagtgattgcagtaataactagaatgccaggagcgcctgccacagagctggatgctgtgctgtgtagacagtggtgacagcatagatatgaaaggctttgcaagactgtgctggggcctcagtggggtacagacttaagaggaagacagattcagagacattaaatgtcctagctgggcacagtggctcatgccagcactttgagaggctgaggcgggcagatcacttaaggtcaggagttcgagaccagcctggccaacatggtgaaaccccttctctactaaaaatacaaaaattagttgggtgtggtggcggacacctgtaatcccaactactcgggaggctgaggcaggagaatcgcttgaacccgggaggcagaggttgcagtgagccgatatcacaccactgcactccagcctgggcaacagagcgagactctgtctcaaaaaaaaaaaaaaaaaaaaaagtctcaccccagatcaggtggtcagttaggcttggtgcctggagtgaccctggtctgatctcagaacttgagtggtttccactaagccacaggaatcatagccgttatctatccagccacacattcattcagcacacagtcattgagcacctagtatatggcaagcaccgtgcaggttgctggggacacagtagggaacaaagcaggcaaatgttctgtctttaggagtttgcattctcatggaggcatcagaaatgaacaaacaagtcagatgctcgtgtgttagacagcgaggagcgctaaggaaagttaagtaggaagcgggggctagggctgttggggagtgggaatggtagacgcaggacacagtggccagggaaggcctaggtgagaaggaggctcttgagcaaagatctgaaggaggcaagggggcttgacaagctgacaagtgacaggagaaccatgcaggcagagggtccgccagtgcaaaggccccagggtgggagggcgcctggcacagtatagaagaagcatccaggcaggcaggcgaggctggctgaccctgcgccgagtgccatgcacatgatctcagtggtcctgtgagcgagccgtggttactccctgtgtgcagagctcatgggttaagtctgtgtgctcaggctcagtgaggttaagtcactagtccaaggccacacagctaacaaggaggtagagccagaatgcagccgcgttcttcactgctgtgcctcagagtgccagaggcctcagtatcagggtgctcaggtcactagggtggcaccaggggcagcagtgctggagtgccaggtcctggcaaggtctacactgtggcagagaaggtccggggggtcacagggaagtgactggggcagtgggggtgaggcccagggcaatggctacttagcagtgggtatagagtattcgtcactgctgcttgggggacaggctggcaccgcactcagccctgatggtcaccgcctctaaccctgcccgcagtgcgccaagtgccgggaatcatttcacgggagtccgctgggcggccagcagtgctaccgcctcatctcggtggagcaggagtgctgcctggaccccacgtcccagaccaactgcttccatgagcccaaacgccgggcgctaggccccggccgcactgtcctctttggcgtgcagcccaaattcaccaacgtggacatccgcctgacgctggacgtgaccttcggggccgtggacctctatgtctccacctcctatgacaccttcgtggtccgtgtggcccctgacactggcgtccatactgtacacatccagccacccccagccccaccacctccaccaccccctgcagatggtgggccccggggggctggggatccaggaggagcaggggccagcagtgggccgggcgccccagcagagccacgggtacgggaggtatggccgcggggcctgattacctacgtgacggtgacggagccgtcggcagtgctggtggtccgcggcgtgcgggaccggctggtcatcacctacccacacgagcaccatgccctcaagtcgagccgcttctacctgctgctgctgggcgtgggagacccaagtgggcccggcgccaacggctcagccgactcgcagggcctgctcttcttccggcaggaccaggcccacattgacctgtttgtcttcttctccgtcttcttctcctgcttcttcctcttcctctcactctgtgtgctcctctggaaggccaagcaggctctggaccagcggcaggagcagcgccggcacttgcaggagatgaccaagatggccagccgccccttcgccaaggtcaccgtctgcttcccacctgaccctactgccccggcctccgcctggaagccggctgggctcccacctcccgccttccgccgctctgagcccttcctggcacccctgctgctgacaggggccggtgggccctggggacccatgggagggggctgctgcccaccagccatccccgccaccactgctgggctgcgagctgggcccatcactctcgagcccacagaagatggcatggctggcgtggccacactgctgctccagctgcctggcgggccccatgcacccaacggcgcctgcctggggtcagccctcgtcacactgcggcacaggctgcacgagtactgtgggggtggtgggggtgctgggggcagtgggcatgggactggtgcgggccggaagggactgttgagccaggacaacctcaccagcatgtccctctgacatgcccagggttctcatccacagcagctgggtcacctgatagggccgccctggacttggggtccctccacctgggggcccctggacactgtctacttggagaccactggcccccttcccccagggttgcccagatggggcctcctttgttctgcattcagcagctatttatcgagtacctactctgtcaggcactgtcataggcgtggggcaaagcaggaaccaagagacgaggttccctgatctcatgggacttaggttctggtgaagggagacaatcagtgcacatgcacacaccccacacgcatacacacatgaacacatgcacatgtgcacacacaagtaagatggcttcagagagggagaagcactgtgaggcctccagaggatgtggcagtgagggacgatggggtgaagtcagctgggcattcaaagaagctagactgagaacgcctgagaagaaccagctacgggaagagctttgggaagcaaaggcagaggccctggggtgggagcaggcttgttttattggaaggaccagaaaactggtaagtgtgacccagatcaagtgtgaggagatgaggctggggatagtcaggggctggatcacccagggccttgtgggccccacatagggttttgggttttattctcagggcaatgggaagctgttggatggtttgatgaaggggagtgacaggatccgatgtacctatttaagaatttaagagggtcgggtgcggtggctcatgcctataatcctagcactttgagaggccaaggtgggctgatcacaaggtcaagagttcgtgaccagcctggccaatatggtgaaaccccatgtctactaaaaatacaaaaattagctgggcatggtggcacacacttgtagtccgagctactcgggaggctgaggcagaagaatcgcttgaacccaggaggcggaggttgcagtgagctcagattgcgtcactgcactccaacctgggtgacagagcgagactccacctcaaaaaaaaaaaaaaaatttaagaggtcactcagttgtgctgtggagaatggaccggagggacaagaggggcagcagggatggtgggctggagtagggtgctggcaatgagggagtctggctcagatgtgggatgtgtatggaagaatataaatgatggtgtggatgtcagggtgagggaggagacaaaaccacgatgacccctagctttgtggcctgaactgtgggtggctgaggggatcgttaattgaatggggcagactgaggcttgtgaggaagatcagagtctggttcttgacatgagatgcccttcagacatctcttcactcaggtccaactagggatacagaaacactgaatatttcaacagcagaaattgaatggggggattgatagcgctggcgagggaagcagctggaaagagacagatggcaccctgagacagcccagaggtgaataggacccccaggctgcagggataaagctcagtggtggtgttacctcaccggggaccagggtcacacagcaaagctggaacaacagaggcgtgttgtgggggagcctcagaggggacaaaacctctgcctgagatcccaccccaggtgggcatgggggccactgaggttggggatgaaaatgccggtaccgtcagtgcacagccctgttccagacagtgctgcctggaagatttctgggctctcctgaggcgccaccccgcacctgagccacctccttggactcctgtcctctaccccttgaggacctccctcccttctaccctagctgtcttcttgaacttgggactctcctttcccaagacttccatcactagctcctggagggactggactttgcatcttcccttcgcgtggagcctcagtgtgagaggccctagccaatgcgtgcatgtcagaggtggtggggaccacatcagaagaagaggggggtgatgaaattaacaaataaaaagtatggggaaaacccaggtgtctgagcgcgtctgcacatgtcccagcagggctaggtctcaactctgacccagccccgcatgctggataacttggataattgcccttatgatggtgccacttccaagctggggtggctttgttcctggctgcccctcttaaagggggaagggggaagggggaagggtatgccccaacagaagcataataaataccaataaacagctcttgtttcccagaagggacgcgctgagggcagacgtgggcagtggaatttgacccttccctagatcttcctcagggaaaccccagtttggctcaggagggaaaacaggctgccttggtcccagctacggctttttgttgttgttttgttttgctttttgaggggacagagtctcactgttgcccaggctagtgtgcagtggtgtgatcttggctcactgcaacctctatatcccgggttcaagtgatttgcatgtctcagcctcccaagtagctgggattacaggcacgcgccaccatgcctggctaatttttttctatctttggaggagacaaggtttcaccatgttggccaggctggtttcaaactcctgacctcaagtggtccgcccaccttgactcccaaagtgctgggattacagtcatgagccactgcacttggcctttttctttttttttttgagacagggtgtctctttttctgtgacacaggctggagtgaagtgatggaatcattgctcactgaagccccaacttcctgggctcaggcgatccccccacttcagcctcccgagtagctggaactacagacgtgtaccacctcacccagctaatttttgtaattttggtagagatgaggtttcaccatgttgcccaggctggtcttgaattctggagctcaagtgatcctcccaccttggcctcccaaagtgttgggattataggtgtgagccaccatgcctagcccaggcacagattttattctgggccccaatagaagggttcaaaccagacagggctgagaatgaaatgagaccctagcacaatgagctttctttttttttttttttttttctctgagacggaatctcgctctgttgcccaggctggagtgcagtggtgcaatctcggctcactgcaggctctgcccaccgggttcacgccattctctcgcctcagcctcccgagtagctgggactacaggtgcccaccacctcgcctggctaattttttgtatttttagtagagacggggtttcaccgtggtagccaggatagtcttgatctcctgacctcgtgatccgcccgcctcccaaagtgctgggattacaggcgtgagccaccgcgcccagcccagtgagctttctctaatccattagagtcacagtcaaaaccgaaagcatcatgagagctgctttacctggcatgcacctaggcaaacaaaatccctgattcctcccaggtgggagctggagatctctgtcctctccatcagcctcagcagcataggcatcttgctgggtgtgttaaacaatgtatcttttctgcacatcccggctccaaagtgcaagctggtttcttcatcaggtgctcagcggaggacgatgtgtgggacccagagggtgtgtgagtctccattatgggccaggaataacactgtattttctttttcttttttttcggagatgctcttgcttcgtcactcaggctggagtgcagtgatgtgatcttggcgcactgtagcttcaacctcctggggtcaagtgatcctcccacctcagcctcctaagtagctgggactacagatgcacgccaccaggcccggctatttttttttggtatttttgtagagacaggttttcgctgtattgcccaggtttaacatggtatcttcatactttgtgggcaatttaagggatttccaggggttaccttgacctcacgtgagttttgcctttatgagctattagtagcacctaccctccaggatatgatcgtggacttgcatttatatgaactgagcagcacatgctggacagtttgcatagcatactgctgtggtttcatttggtctctccagcaatcatatgaggtcagtaacccgtaatccccatttgcagatgagaaaacaaaaggtcatagacatggtttagctgttgcatgagagctgtcaattgactctcagacctatgtgcctgaccaccaggctcttccacctcccaaggaaggaccccttaaattaggtcgacatagctgaaagctgtcccagcacacgtttagaggtgatgccacatgactacctgtacctcacagcaggaagggtgaggcttttccaagcatctgtaaccacaaatcaaaagggtcaacagtccacctcactcatgcctgtaatcccagcactttgagaggccaaggcaggcggatcacgaggtcaggagttcgagatcagcctgatccacatggtgaaaccctgtgtctactaaaaatacaaaaattagttgggcatggtggtgggcgcctgtaatctcagctactcgggaggctgaggcaggagaattgcttgaacctggaggcagagtttgcagtgagccaagattatgccactgtactccagcctaggcgacagagcaagactctgtctcaaaaaataaataaataaaaataaaaataaataaataaaagtacaaaaattggctgggcgtggtggcgaatgcctataatcccagctacttaggaggctgaggcaggagaatcgcttgaacccgggaggtggaggttgcagtgagccgagattgcaccactgtaccccagcctgggcaacaagagcgaaactccgtctcaaaaaacaaaaacaatagccaatttctgctagggataatgcagaatataccaactagaaagctaaggagtgtgagatttgctgccctgagagagggagtcctgagggcttggagttccacctgcatgagcagaaaggagctaagattctttaggactcctctgtgttatgcgtggacctctcaggtgaagtgtcttcctagcagtcatcctgtgactttgccctcctaagcagatgatttgcaccacgactgggccttttctctgggatgcatagccacactccctccgactctcacaagtgctctatggtacgtgttcctccctccacgtcagccctctgccgtcacttctccctgcacatacctgagtgcaagtggcgtatgctgaggtgggagagagtctgggcatggaaggctggatgcctggttctaggctatgtgcagctccaaaccccctggggatttcagggatagagggaatattttactgagggcctacagccctccaggcactgtgctgggtgcttggtgtgaatcttatcttgccaacatcactgggaggtgccagcttggttttccattttgcccattcgaaagctctgttgactaagaactcagggctaattaagagacgagccagattgtgacacaagcctgtctctgttgccccacacgttacctccaaagttgctttccttttctaagccaatgtcttctgattgcctagaatgggccccgcattgtgctgggggctggggacagagtagtgaataaggtctctgccctcatggagctgataagccagtgtggtgcccaataataagtaaatgatgctgcatgctggaaagtgatcagaaaaggcagtgagagagcaggcgtttggcacttgctattttgcttttttttttttttgagatggagtttcgttcttgttgtccaggctggagtgcaatggcgtggtctcagctccctgcaatctctgcctcccgggttcaaacgattctcttgcctcagcctcccaagtagctggtattacaggtgcctgtcaccacacctggctaattgttgtatttttagtagagacagggtttcactatgttagccaggctggttgtgaactcctgatctcaggtgatgcacccaccatggcctcccaaagtgctgggattacaggcatgagccactgcacccggcctgagacttgctatttaacataggtgggatgggaaggcctctcttgtaagacgatacatgagcagaaattagggagtgagccagagggacatttgagggaggagcaattccaggccaagggaacagccagtgcaaaggccctgagttggagtgtgcctgacatttcagagaaacaagactcatgtggttggagcaaagaaggaataaggggagatagggagacaaggtcacagagggaacaagagctatgtcctgtaggtccctgcaccacggtgaggactcaagcttccactctgtcagagatggcaccatgggaggattctgagcttgggaagaatgagctctgacgtaggtgttcacaggattcccctgggaggaagaggctaatggggtaggagagggtgggaagcccatggaggaagcccctgtgtccgtgttgaagaggagagtggctggaacaaggtcgggatagcagagtggagagaagtggtgagattctggatatattctgagagcagaaccagcagaatttgttgacagattggacgctgggtgagagagaaagtgactgagcaacggaacgggtagagtttgctctttcctggcatggcaaagactaggcagagtcagtttgggggttggggtacatcagcagttaggttttatatatgttaaatttgaggtggctgttagataccccgagggaagatgtcactcaatgagtggatacagctccagaaagagagagggagagataacagcaaataatagtaatatattaatattagaataggccgggcgtggtggctcacacctgtaatcccagcactttgggaggccaaggcgggtggatcacgaggtcaggagatcgagaccatcctggctaccacagtgaaaccccatctctactaaaaatacaaaaacattagccgtgcgtgatggcgggcgcctatagtcccagctactcaggacgctgaggcaggagaatcgcttgaacccgggaggcggagcttgcagtgagccaagatcatgccactgcactccagcctgggcgacagagtgagactctgtctcaaaaaaaaaaaaagatagttactatattatacatattatagtaatattaacaatgattttggccaggtgtggcggctcacccctgtaatcccagcactttggtaggccaagataggcagattgtttgaggtcaggagtttgagaccagcctggccaacatggcgaaaccctgtctctactaaaaatagaaaaattagccaggcgtggtggcacacgcttgcaatcccagctacttgtagggctgaggcacgagaattgcttgagccccggaggtggaggttgcagtgagctgagatcatgccactgcattccagtttgggtgacagagcgagattgtcttaagaaaacaaaaaacaatgattttgttttgttttaagacagggtctctctctgtcacctaggctggagtgcagtggcgtgatcacagctcactgcagccttgactttctggactcaagcaatcctcctgccatagcctccagaatagttggaactataggtgtgagccacatgcacagctaatttttttttttttttttttgagatggagtctcgctctgtcacccaggctggagtgcagtggtgcaatcttggctcactgcaagctccgcctcccgggttcatgccattctcctgcctcagcctcccgagtagctgggactacaggtgcccgccaccatgcccagctaattttttgtatttttattagagacggggtttcactgtgttagccaggatggtcttgatctcctgacctcgtgatccgcccacctcagcctcccaaagtgctgggattacaggcgtgagccaccgtgcccttgcccagctaatttttaagaatgtttttctttttctttttcttagacagggtctcatcttgtgagctcattgcaggcttcaccttctgggctcaagtgatcatcctaccttagcctctcagttagctgggacttcaggttcacgtcaccatgcccagctaatttttttcttttttttgagaaggagtcttgctctgtcatccaggctggagtgtagtggtgcaatctcggctcactgcaacctctgcctcccgggttcaagtgattctcctgcctcagcctcccaagtgcggggattacaggcacccaccaccatgcctgattaatttttgtatttttagtagagaaggggtttcaccatgttggccaggctggtcttgcactcctgacctcaggtgatccacctgcctccgcctcccaaagtgctgggattacaggcatgagccaccacgccccgcctcatgcctggttaatttttgtgtattttttgtagacacagttttgccatgttgcccaggctggtctcaaattcctgggctcaagcgatcctcctgcctcagcctcccaaagtgctgggattataggcgtgactgctcctggctcaaaaattttttgtagaggccgggcgcagtgactcatgcctgtaatcccagcactttgggaggccaaggtgggtggatcacgaggtcaggagattgagaccatcctggctaacacggtgaaaccctgtctctactaaaaaatacaaaaaattagccgggcatggtggcgggtgcctgtagtcccagctactcgggaggctgagacaggagaatggcgtgaacctgggaggcagagcttgcagtgagccaagattgcgccactgcactccagcctgggcgacagagcgagactccatctcaaaaaaaaaaaaaaaattttttttttcgtagagatgtctcgctgtgtcgcccatgctagtctccaaatcctgtcctgaagtgatcctcctgcctcagccctccgaaagcattgagattagaggcaggagccaacacatccagcccacagtgatttgagttcacactttggcctttccctgtgtaccatctcttgttctcacaatagccatatgacatgctagggactgttagtcctatagggggaatcaggttcagaaaggtttatgaattcactaagataacacagctaaatggtgaggagtcaagattagatcccaggtctgtccaattttgagacctgaacattttttgatctgctgttggttgcttttgcaggaaagagggttgattgaagtagacagtccctaaaaattcctttttaggccaggcgcggtggctcatgcctgtaatcccagcactttgggaggccaaggcgggaggatcacctgaggtcgggagttcgagatcagcctgaccaacatggagaaaccccgtctctactaaaaatgcaaaattagctggggatggtggcgcatgcctgtaatcccaactactcgggaggctgaggcaggagaatcgcttgaacccgggaggtggaggttgcagtgagctgagatcacaacattgcactccagcctgggcaacaagagcgaaactacgtctcaaaaaaaaaaaaaaaaaaaaggtccgggtgcggtggctcactcctgtaatcccagcattttgggaggccaaggcaggcggatcatgaggtcatgagattgagaccatcctggctaacacggtgaaaccctgtctctgctaaaaaaaaaaaaaaaaaattagttgggcgtggtggcgggcacctttagtcccagctactcgggaggctgaggcaggagaatggcgtgaacccggagcttacagtgagccaagatcgcgccactgcactccagcctgggcaacagagtgagactccgtctcaaaaaaaaaagaaaaaaaattcgtttttagctccagagagccttaagcttataagttctctgctttggagacaaaagtcccccacgcctgttcgaattgtgtgcaggccaacagtccatagatatggagcaagcaagggcgctctcctgttttttctttgaacttcagtgcctccgtcctcccaagactgactttctggttttgcttattttcagaatgcaggcagcttcaggcagggagtctgcagctaaagagttagtggttttactttgttagggtgagggcaactggggtttgggagggataacttgacaaagtcacacactgcctggcggggtcacacgtaggcatctgtcttgtccccacctctctcaccaatcctctctctccacccagattcctaccctgggacaaaatggatgtaggcggagttggttttcaggtttttattgtgggtgtatttctggcagcgggacaggggtggtgaggcagtccctcccaggagtggccagagaaggccagaggcgagactggtggaaaaggacggggaagacagggaacttccttactctcggatcttcagttcccgcgccatctggcagagggcgcagggcagacaaaaggtgagggccgcccagtcgtgcccgacggagccctagagggtaggagagagcggtcaggagccccgcggtgggtcccaggaggccagtccccagctccctgctcccgcgggtccccagcccggcgcgcacctggatgtggtagcgctcccgcatgccggtgcggatggagtgcaggcctccgggcaggtagggcgcgcagcagcactcgccaaagtcgtcggagatgcggcaggcaaggcacagaggagcaaaagtgccgcacagacctgggcggggcgcaggcgctcaggggcggggccagccggggcctcccgacggctccgccccggggggggcgcggttgattcgccgcggaggggcattgagggtcccagccaaggagaggtcccagagggaattagaggtccgaggagaggatggcttagcgattggaaggcagggtttttctttttttttttttcttctttttttttttttttagaaattggaggctgggtgcagtggcttacgcctgtaatcccagcactttgggaggcctaggcgggaggatcacgaggtcaggggtttgagaccagcctacccaacatagtgaaaccccgtctctactaaaaatacaaaaattagccgggcgtggtggtgtgtgcctgtaatctcagctactagggaggctgaggcaggagaatcgcttgaacccgggaagcggaggttgcagtgagcatagactgtgccattgcattccagcctgggcgacagagcaatactccgtctcaaaaaaaacaaaaaacaaaacaaaaaaaaaaacgaaagaaagaaaaaaaaagaaaaagaaattaaagtctcggtctgtcatccaggctggagtgcagtggtgtgatcacatgtctcactgtagcctcgacctcctgggctcaagcaatcctcccgcctcggcctcccgagtagctgggactactggtgtgtgccaccacctcgggctaattttattttttatttttatttttgagacggaatctcgctctgttgcccagactggagtgcagtggcgtgatctcggctcactgcaacctctgtctcccgggttcaatcaattctctttctcagcctcccgagtagctgagtttacaggcgcccgccaccacgcccggtttttttttttgtatttttagtagagacggggtttcaccatcttggccagactggtcttgaactcctgaccttgtggtccacctgccatggcctcccaaagtcctgggattacaggcgtgagccactgcgcccgacctattttttatttttatttttgtagagatggggatctcattatgttgcccaggctgatcttgaattcctggcctcaagggattgtcatgccttggcctcccaaagtgttgggattacaggcatgagccactgcactgggccaggagctagggtttgaagagggagttgggggtcacagtgaggaaagctgagcatgcaaaggggaggttgagggcctgataagttgagtgtgggaaggcatgaggtagtatcctaaggagtgttgggggtctgaggaaagggtgactgttagagtgggaattccaagtccagggaagggaggtgggagtggggttagcaagcggtgggaggaggttggaggtgagcttccctctcctgattccccccaaacccatcttccaccaggcctggagagggagcaggcaggcactcacagacaggcatgtcgttgcagcagtccgtgagacctgtgtgccagtcactgagctgggtctggtagcagctggtggtggcgcactggggctgactggtcacagggtaggacatagctgcagaggtgggagggtaggggtcagctggcagcctcgcagcatctcctgggccccgcacttcggccacccttccctgtgccgggcagtctgggcggggccgccaggccgcccactgaagggacaccactgtgcctcccccttcccttctgctacatctgggcaccggcaaccccagtctgtccctgttgctgctggctcctgcacgtctggttaggctgggggtgggggtctcctgcacatctgaggaagggtggggaccacatctgggtggggcctggcggtgccgcctcctcctccacgtctgggcctgggttctgggttgcagcatttctggggcctctggggtggaagcaggcgccgtctgtcttcgaagcaagggtgcccaggggagggaggcggccaggttccagtactgagagggttgctggtccacccagcggtcccacctttgcctttcacgttgtcgtgcatctcaaactgcatcttgctggccctgaggaggtggcgttggggacggcagaagtggctgtggcaacagtggcagagtctgtccaagggacgctggatactggggaggtgggggcaagggactggggcactgggggctgggctctcagggggaggggagctggggagaaagaggccaagtcagcctgtcaaccaggagagacatggaatagggaatggatagggcgggggcgagaaactcgcccatgtctttccaactgcccgacagattgcagaggaccctccccatacccgagatagagcttgagggagaacaagaaatggagatggacagagtcagagacaaggggagaaagatcagagccaggtgcccgtagagatgtcaccagtaatgcccacatgtgcccagcactttgactcctctgcaagcccatctcacagatgagcactgaggctcagagacatgaggaggaacgccccacgtctgacggcccaggccaagggggttcatagaggtgatgctgggccccaagacttctaaattcagctcagcacaccccagttaagaaggacagatttgggggcattgggaaggacagagatgtcccgagagaccgacaatcagcgatatgaaaggagacagagtgatatgagtgggatgaggaggagggagaacagagcagaggcgcccaacctcaaagaagagggctgcggaggggatgttcctacctgcaggatcgcgatggcagtgatggaggcagacgtgtggagacacgggcactgacttctccgtctcagcccagagccacttatatgggcggccacgcagccctgggcggggctctgacagaggtgcccagggagccaagccggtctgatcgaccctctccccacactgggatttcccgccctccctctccactcccatccccccacttctcctcctgcctcagctcccaggacccagggaaaagaaggtggcggggggtgggaggtttggcgggggcggggggccacagccgggtcaatgcgcagagaccaaaagagagggagagacagaaacacagtgtcagaaaggcaggcagggaagtccctctagacagaaaggagagagaggagattcagagagatggagagacgcaggaagatgtagagagatggagaggtgccaagaaacagaggggcacaaaaatgtgaaaagaaataacaagaagaggggagatgggccaggcatggtggctctcgcctgtaatcccaaccctgtaatcgcctgaggtgagaggatcgcttgagcccaggagttgaagaccagcctgggcaacatagggataccccatctctacaaaaaatacaaatagaattagccgggcatggtggcatgtgcctgtagtcccagctacttgagaggctgaggcaggaggatcgcttgagtccagaagtttgaggctgcagtgagccgtgttcccgccactacactccggcctcagtgacagagcaagaccctgtcttaaaaaaaaaaaaggaaagaaaaggggagatgggagacagaagagagacggagatggaaaagtggagaggcaggtggggggatcactgaacaggcttagagggcagggaaatggggagaggtgatgggtggggagagaaaaaggccgggtggagtgggagagagtgctgtgtgggactcccctttcagggtctcgctcatctctctcagtgatatccccactttcctgggagagggggacagtgtcctccccattcaagccaggagacacatggggggcagtgtgttttggggaatgactcatgttggaaccaaagtaaataaacacacctcaccccagctccaaattgggaagggaggaggctgggaactgaaaagccgcagttcctgaaggacgtggacgtcacctgggactcctgggtcctaatggagcaaaggagtgggggcttggacccctgggtctgagggaggaggggctggggccctggactcctgcgtctcatgaggccaggctgcacatccctcagtagggtaggggtcctgggattccacactgctgggctcctgagcagggaaggagctgggggtctgggtgcctgaatcgccaaagtttccccccaacaggcctgacggggttgggaggtgactcagtgagggaagcagcattagagctgggtggggttctcagcacgggtgtcaccccaaaaatgtaggaggcactagaaaactggggtgtcacctgcagagaaggtggtgtcatcaccccgccgggtatggggtgatggcaggtggatcaccctgctagctgggatcccaggtgtcccctccctccctccctccctccaacacattaggacccaagccttggtctcccagcaccacccagatggttgggtcttcctgtccccagaactcccggcagcgctcactgtcttgccggtgcacgtccgtcattggtcctagagcctggatgtctgggggacatctcctcacttgtgtcctaacatccctgtctcctcatctctgaatcttcgtctctcaccctgcatcttcacctttccagctgtgaatctgtctttctttcctcatctctgcaaatctctttccaaatctctgtctctccatctctgggtccctctccttccaggctctgtgtctctgtgcccttatcccggggtctctgtctcctatgtcaaaatctcttctgaatctcgcttcccatctctgttcatctccagacctgccctgtggaggcagctacagggccccatcccccctgctgtccagactaagggtgcaggtgactcaaggtcagtcatctccgaggaccccagggctcccagcatgacactctgagttgtcctcaagtttcctctctcactcctgacacagcctgggggccccaattagatctagcaattcatgcaggtgaggaaatagagactggggaagctgtgaggtggcctgcttgggggtgaggagggccgtgagcaggaggaggagctcctggggggctgaggagtgatggtggcccagtcaccaggcattggcctacatcctcctcaaacagggttgccacataaaatacaggctgtcctgtaaaatctgaaattcagataagcaacaaacaggttttttagcatgtttcatgcagtatttgggacatatttatactaaaaaagtatttgttatttatctaaaattcaaattaaattgggcttcctatagttttatttgctaaatctggaaccctaccatcaaagacagaggagttcaggactccagccccctcttttcccagaacctaggagtccaggccccagccttccctccttaggatctgcgagtccaggtcctaatcctcctcctcccccttagaaggaatggggcacccaaccccctcctcctttggaaatacaggagtccaggctcccagcccctttctccccagaacccaggcatccagaccaggtctcagtccagttgcccaatgtgggtcagtcatcactttgggtttcacaaggtgggttgtgccatctgtggccctggtggaaccggtccggcagagcggacaagtggcgtggtcccccttcccttcctcaacctgctgtttccttgaaggccagcccagcggggctgggagcagaacaggagggacttggggagctctgggtgtgcccctgtgtttgggtgtattgtgtctctgtgtgtggttgtgaccaattgtcatgacaacccccaactgtcatgatgtgtctctgtgctttttctgtggtctgcggtgtgatatgagagggtctcttctatttgtgtgtctgtattgccctcctgtgagtctacacactgtgcactgctgtttgggtgtgtttgcagttactgtgattctgtaattccggttggattaaggcagcaattatttattgaatggcagccttatgtgatggactctggagccagaaagcctgggttcaaattcgtgtttttttttttttttgagatggagtttcactcctgttgcccaggctggagtgcaatggtgtgatctcagctcaccgcaacctccacctcccaggttcaagcaattcacctgcctcagcctcccgagtagctgggattacaggcatgcaccaccatgcccggctaattttttgtatttttagtagagatggagtttctccattttggcagactggtctcgaactcccaacctcaggtgatcctcccacctcggcctcccagagtgctgggattataggcgtgagccaccgtgcccaccctcaaattctttttttattgagacaaagtctcactctgttccctaggctggagtgcaatgagtgggaggactcactgcagccttgacctccccgactcaagtgatcctcccacttgagcctcctgagtagctggggccacaggtgtgcaccaccatgccagctaatttctaaaatttttttgtagtgacggagtcttgctatgttgctcaggctggtctcaaactcctgggcccaagcaatccttctgcttcggcctcctaaagtgtcaggattaaaggcatgagccactatgcccagcctgggttcaatttctgactgctggctgggcacggtggctcacacctgtaatcccagcactttgggaggctgaggcaggcaggtcacttgagttcaggagttcaagaccagcctggtcaatatggtgaaaacccgtctccactaaaaacgcacacaaaaacccaggtgtggtggcatgtgcctgtagtcccagctatttgggaagttgaggcaggagaattgcttgaacccaggaggcggaggctgtagtgagccaagattgtgccactgcactctagcctgggtgacagagcgagactccatctcaaaaaaaaaaaaaaacaaaacccaccaaattctgaccacctgtcagtggctgtgaaaccttgggcaagtcactaaacttcttcagatatcaattttcccacctataagatgggttgttgcaaataaggttgtagagagcattaaataaaaagtgcggccaggcacagtggctcacgcctataatcccagcaccttgggaggctgaagtgggcggatcacctgaggtcaggagttcatgaccagcctggccaacatggtgaaaccccatctctactaaaaatacaaaaactagccgggcatggtggtgggtgcctgtagtcccagccacttgggaggctggggcaggataatcgcttgaacccgggaggcagaggttgcagtgagctgagatcgcaccactgcactccagcttgggtaacagagtgagaccccgcctcaaaaaaaaaaaaaagtgcttggaattgtgcctgtcacataggaaacattttttgttgctgctgctgatgacgatgatgtgttcttctggttgccggggatacagtagggaattaacccaggtctttgctcatggtcctcctggtaggagctggatgagtggcctctcagtgactggccatgtaactgcatcgctggggtgtctgttttgcatgtggaataggatatttcttgtgtgctgtgatcacgggcgattctgtggttgtgtgcctatatttgtgtttgtgcttgtaggtgattatattgctgcatgtgtgtgattctttgtgtgggtgcaaatgcaagatcaaatctaacacaaattgtgatggcacgtgtttggtgtgatcttgcatttctgattctgaggtgctgggagtgtgtctataattggaatcttgagaacccttctctcagctgtgaggccactcccttacataacatcccataggtgacccctgggagagatccttccaagatgagccttggtttctccctaatggggatagtgggcccagtggctcaaggagaaacaggagattgaaagggaaggtgggaggggaccagtgaggccagggagagggtaagagacgtgatggtgacacagaaaaacgatggctggattgggacagaggaagagctgcccagagacggggatctctgtccattcattccatgagcatttcctgagcccctgcaatgtgccaggacctctggtcggttcagggtctgggggaaagcagagagacccagagagatgacccccaccaggaaagctgttgctgccccaaggtggcccactgcctccacaatgggcctcagtgacagttctgagtgaccgagatgcagtgatggggagggacagagaaggccagatctgtccagatcaaagaacagaggccatgggggaaaggtcccttccaggcgaaggagaccgccatgaatcatgttcttatcacctcctaataggctcatgatgcaagtgcacctcctaatcactattttcgaccccaaccaggctcacgcccacagtcagaagggttggacaagcttagtatcgtggattcacgggagaaaatatctgggagaccccatccttggacctgctttccccaggacccaggagtccgggtccccagctctccagttccccagccccaggagtcccagctctcagcccctctccttttgtttgttgcctgcgttttcttttttctctctgggcctgtaactctttgtttatctccatctatgttttgtgtctctcttgtatctttacatctgtatctggattctccctcactaggcctcaattttctcacttgtaaactggggataatactactaataataatccaatctctcagagctgtggcgaggaagacatgagataattatgtaaaatgctcagcacagaaccaggccacagtaaactcagtacaagagagctctgttattattactgttttatttttgccatctcccctttggtatctctatttttctcttagtctcacgtgagtctccagtctcctctagctctgggttccttttgcagacagcacctgcctctgacttcccttttcgggatgaggaaagggcatatccaggccagagcttcccctgagcctcttccttctccctctccattacaagctccgcctcattacccagaacacttgcctgggggtaaggcctggctcccttcccataaatagcctcataaaatcctgaaccccaaacctgtcatccctgggcgggcgagtgactcaagatcccggagttcccgctcctagacaccaaaccttcaggtttccagccccctcctccctctgacccaggagtccgggcccctagtccctccttcctcgggtcccagacttctcctccttcagaaccaaggagtctgaactctcaaatccccaaccttcctcaagacccaaggatcgggtcagcaaacagcctaggtatgtggggccagaaactccattcacgaccattctgcgaccgtctacgcccagggctcccaccccgactcagtccctccggaggcgggtccgacacgcgaggcgcttctttggagtctggcggcgaaagctatccatgacgtcagtcactatcttccagccaatggacactcggccttctacctccctgggccactcaggaccctttgcctggtaggcggggcccacagcccaactcgggcagcgataggctttcggagacgccagtctctgccaggcccagtcagtcggccaatagacccggaacctgagggatcggaatcctggtccactccgcagaggcccgagcgggctcgcgagggaacgggttctccgagtctggccgggtaagccctttccagcacgcctagtattaggattctgcacatagctcgggtggaaaaccgtgaggcttagtgaggcttgaggcggaggggggaggagctcagtcccggcgaacccatcttgctttcttggagaaactgagaccgggatactggatctgttattcatccatccgttcctcccaccctaagcctgattctcgtctgctcctgccttcctgttccttcatccgttctgcccttcctgccctcaattctctcactcacggattccctcgtctagccactcactcacacactctcccacctattagttagacaaacatttcctgaggcttctggtgtgccaagcctcgtgctgggcgatgctggtgaccaagatgagtcaggcctgggccgtgccctcaaggagcccgggtcagatgggaggatggacgttgatgggcatgggtgtgcggagacggtgggagcccaggagagacttttttgagtttggcgtggtcgggaaagggtttccaggggaggggccattggagctggatcttggaggagcagaaggtgccaggcaaagtggagatgccaggcaaaatgggtgtggggagggtgtttcagcgtgaccaaagacagggaggcatgcaggagcagtactgcgtgcaggtgcctaagcggaaggccagtcaagtctgtatggccagcaggggaactgtaaggctggaggaggccgaagagatgagcagaggccaggctgaggagcttggactttgtcctgagggtgagggggtagtggagagccatggaagggttgagagtagtggaggacaaggtcatagttggtccagaactggaggaatgagactggaagccagtagcccaggaggtggctctggcagggattcaggtaggagagagtggagcctggatcagggaagaggccgaggggataagatagagattcaggaggcaaggcttggtgctgtggctcgtgtctgtaatcccagcactttggaaagttgaggcgggaagatcacttgagccaaggagttcaagaccagcctgggcaacatagtgacagcctcatctctacaaaaaattagccaggtgtggccaggcgcggtgactcactcctgtagtcccagcactttgggaggccgaggcgggtggatcacgaggtcaggagttcaagaccagcctggccaagatggtgaaaccctgtctttactaaaaatgcaaaaaattagacaggcttggtggtgggcacctgtaatcccagctactcgggaggctaaggcagaaaattgcttgaacccaggacggggaggttgcagtgagctgagatcgcgccactgcaccccagcctgggccacagagtgagactcaaaataaaaaaaaaaaaaagaaaaattagccaggtgtggtggtgcatgcctatggtccaagctactgaggaggctgaagcaggaggatcacttgagcccgggaagtcgaggctgcagtgagccaagatggtgccactgcactccaacctgcacaagagtgagaccttatctcaaaaaaaaaaaaaaaaaaaaagaaagaaagaaaaataaataaggagattcaggaggcagagagaacagaaagtggggattgatgggctatgggacaaggggttgtccagcatgagacccagagctctagtctggaggacagtggagccatctctgaggtggggacaggaaaagaggagcaggttgatgggtagtgactgttttgacagaggtgaccaaggggttctatgagttggacaaggagagtggtgactcaggccagtggatctggaccttcaggaagagttctgggctacagctccctgccccagcacaggccctgactcagaagtcacttgctgggtgaacgaggacctctgagctgaggatcccttgcttcgcaccccgtgaggaaacggctttcttgtttctgcatcttcagtctctcccactcctccagcattcaaacatgtccatcatctctaaacacatgtgccctgtatcaggctctcttgtggcgcccactggctcaatcccttaccttccactccctcttcaacccactatgtctggctgcctaacggccatgaccctgcagtggctctggacaaggtcactgaggtcacctgctcattgctgacacctgagggtaacatttcaatcctcatctgacctggtccactccctgaaactcccttcaccctacatcctccttcctgggcagcttcctccctctctggctgctccttagaacccgccagccttgccttccactgcccacccccgcccacccctttactaggggtgtgatcctcagggctgtctctgtcctggccctcttgttgcttgtcccacctgcccaggcttcctggaaaggttctagtcccttggttccacctagactgcatttttttttttttttgaggcagagtctcattctattgcccagactggagtgcagtggtgcagtctcggccgactgcaacttctgccttccaggttcaagcgattctcttgcctcagcctctcagttagttgggattacaggcgtgcaccaccacacctggctaatttttgtatttttagtagagacagtgtttcaccatgttggctgggctagtcttgaactcctgacctcaggtgatccacccgcctcagcctcccaaagtgctgggattacaggtgtgagccaccacacccagccccagactgcacttctgacccttgttgtctcctggattgtcttcctgagaccttccagctcaccatgtccagaatggccctccacaggtcccacctgtcacacacacacctgagcctcctcccattgaagagacagcttcactgtccacctgcttccatggccagacctgggtgtcatctctgtccccttgctgtcctgtaacctcatcagtaggtgctgtccttcccaccttttatggctctgggatgctacacctacactccctacccttacggctcctgccccagctcaggcatcctccttggcctgtaggactccagttttgcccttttctgtccatcccccagtgtcccagcaggatctttcagtgccctgagctgaccctggccctttcctgctcaaagtgctcctgtggctccccactgccctccagtttagtccaaatcgtactccaggctcttcaggccctgctcctgctgaccactccaggcccctcacgcccctccccactttgcacctgaccttctggtcaggtggaagctttttctagccaggtggcagctttgatcactgccagctggctctcacaacctggcatgttttttcttcctagcagacttttgttcatcctgtagtgtcaagctcagatcaccacctctgtgaagccctccctgactaccacaggtggaacccctggggactgtgacagcctgtgtctgttcttccaccctctctgaatccaggatcagaagccctttgaaggcatgtcttgggtataaatcatctcaactccaaactcagggcttacaaggggccagagagttggtccaagagttgattgtcacagctggacagagcttgcatttccagtttttgtttttttggaaacagggtcccactcttgcccaagttggagtgcagtggtgcgatcatagctcactgcaacctcgaactcctgggcttaagtgatcctcctgcctcaccctcctgagtaggtaggactgcaggagtgtgccaccacgcccggctaatttttaaatgtttttgtagagactggtctatgttgcccaggctggtctcaaacccctggactcaagctatcctcctgtcttgcctcccaaagtgctgggattacaggcgtgaacctccgtgcccggctgcatttacagtattttgagcgccagtttgtttctgatttcctgctaactttgctccagttctgtagggtgtttgggtcactggagcctttgagacccgagagattatttttaacttttatatccccctgatggatgctgagcctggtctccctgggaccagggtgagtccagctaaccgaaggtcttcaaggggaggagctgaggacccagcatctcctggcagtgtacctggatgaagtccgaggggaggtgggtccgggttaccaaggagtccactcccttctggtcccaaaaatccagtcccccatacccctcattccaggtttcttggttcccagccgcttgagtccgatgctgccccctggtgggcaaacaccccaccgtatttgagagaggccaaactaattaaatacttttatttacaacaaaccaaaccgacctgcaagggagggccagtccccgtccctgcggcggtcgccgcagcagcagcagcaaaaggcagcggtggcgtgcaggtccagccgtctcggtgaccggtgtgtgtgcgcgtccccctccccgtggcgagggtctcagctttcgggcccccgccccgcccccttgccacccccgacttaagtaaggcacagcccgcgtccccttccgcccggcccggaaggcattcatgacggaggccggcgcagatgggaacaacaggcttttagtgtcgccccccgcagcccccgtctacccccgcagcccccgtctccccgctcggcccggctccggcgggaggagtgaggacgaggcggatgcgctccacgcacagctctgcggcctggcgcgtctcgcggcacagcgccgctagggtcaggaagccgtgcggcaggtcctccaccacgcgcagcgtcaccggctggcccaggttgcgcagtcgccgcgcgagcatgaccgagtcgtccagcatggggtccagcgcgcacgcctacgggacagcggggagggacgtggagagagggtgggggacagacagaccggggtcgggtagagcgaggaggggtttgatgaacaaagggagcgggaaatacggatacagacggagtggacggaggcaggagacatggtgggtgaggagttggggagagaatggagggaatggggggagttgtgggaaggatgggagaatgactttaactgcgatccccggcctctctccagcctctccctccccaccccgccaaacccaccttttttttctcttgattctccaagcccaaggggctgccccactgatcctgtctcttggtactcaaaattgcaaagtaaaacggaggcagccctgactcttgtcctcctcccgttcgttcggggcattgttctcccctggggacacgcctgtccctttctccccactccggagctctttttcccaggtgtacccgtgcccggtccccctcctccccgggtgccctgctcttctctaaatgcacctgtaccggccccctctgtcgctcaccacgatgtgcacaggtggcaggctcttgagcatgctgtcgggtgccagcagcggcgacatgaaggggttcttgactatgggtgaggagtagaggggcatctgtgtggcaccctggctggagcgtcgggggtggaaaccctcggggaaggcggcacggacgcccaggcctctgtccatggggctcagctcatttttggcctcagcctcttcccctgcatcctcaggtggtaataagaagttgacatcggagggtgtggaggggctaagtgtctcagctgacagcgacatctcgggggtgtccgacgacgtctcggagtttcccctcaggctcaagtccctcagggtcaggttcttgagggaatccgtgcccagtgggccctggggctgggccagtgctgcttcagacacactgcggcgcatcggctctgagagagggagagcagataggcctggctccgttagtttggttgtgtgtgtggctggcagggaatgccatgggaagggcagtcgcctgtggagcgctgtgaaaggctgtgtttccccagactcttgcctaggggatgggtggagttccagatgccccaggtggtcatggtgggggtcttggcagtggggcagtgtgttctagtgaaggatgtgtgtgtgtgtgtgtgtgtgtgtgtgtgtgtgtgtgtgtgtgtgtgtgtgactgggaagattaggtgcagtttacctctaggaacctattttttcttctagatcaaggaaatgaaaatagtccttggttcataggtggcaggactcagtgggataagatgtgggattaggtaccgctacccactggggatcataatatatcgttttttgtttttttttttttgagacaaagtctcgctctgtcacccaggctggagtgcagtggcaagaacatggctcactgcaacctccacctcccaggttcaagtgattctcgtgcctcagcttcctgagtagctgggactataggcatgtgccaccatgcccggctaatttttgtgttttttttttagcagagatggggtttcgccatgttggccaggctgttctcgaattcctggcctcaagtgatccgctcgcctcggcctcccatagtgctgggattacacttaccacaaggtgtaaatggatcaaaatgatttgaatagtaagcaggcccagtggcttgaagggaggctctgttcacagggagctaacaagtctccagggtgtatcacatttctaggggtctggcacctgtagccacatggatctgcttccccacatttcctttgtgttcttcagttttatccgttcacgtgaccaggcaagcaagtgcccaaacgatgctaaagatacacttccagcccacctggcgtgcccagcttggcctcagctctgttcattttatcagacccacactgcctaccatgagggccaagatgctacagttttagttttttactttttttttttttttttgagatggagtcttgctctgttgcccaggctggagtgcagtggtgcgatctcggctcactgtaacctctgcctcccgggttcaagcaattctcccgccacagcctcctgagtagctgggattacaggcatgccaccatgtccagctactttttgtattttttttttttttgagacagtctcactctgttacccaggcttgagtgcagtggcgtgatctcggctcactgcaacctcgtctcttgggttcaagtgattctcctgcctcagcctcctgagtagctgggattacagatgcatgccaccatgcccggctaatttttgtatttttagtagggatggggtttcaccatgttggtcaggctggtctcaaactcctgacctcgtgatctgcccgcctcggcctcccaaagtgctgggattacaggtatgagccattgcgcctggcccatttttgtatttttaatagagatggggtttcactatgttggccaagctggtcttgaactcctgacctcaagtgatccgcctgccttggcttcccaaagtgttgggattatgggcgtaagccaccacacccagccttacttgtctttataaatctacgaaggtgaggtgcaaaacaatgtgagaataactacttaagtactttgtggcccagagggtcactggaacagaatggacacaccaggggtgctggcatcttctaatagcacctactgggtgccatatattgtactggccaaatggttggaggcagacctcaccacagcccagtaagcgtactctttttttaaatttttttttttgagacaaggtatcgctgtgtcacccaggctggagtacagaggctcagtcttggctcactgcaacctctgctacccaggttcaagcggttctcatgcttcagcctctctggtagctgggactacaggtgtactccaccataccctgctaatttatttttttgtagagaaggggttttgccatattggccaggctggtctcgaactcctgacctcaagtgatctgcccaccttggcctcccaaagtgctgggattacaggtgtgcaccaccacacctggctaatatttttgtacttttactagagacagggtttcgtcatgttgaccaggctgatcttgaacccctgacctcaagtgatctgcccacctcagcctcccaaagtgctgggattgcaggtctgaaccaccatgcccagcatcttccctgggacttttgctgtgctaggctgtccctcctgcccaccctggctgggcatgtgacgggagtgaatcactcacctgctatgggctccgacatcttctgggacttgcgcccacttaactccaggaaggagttgagccatgaggaggcacccaggcggaagtctcggaggagcagggctgtgtcccgccgcaccagccccatcatgccgagggctttctggtctgagttggagtggtcctccgtctttgcacctgcagaatatatgtgggtagctgagttgttttcccctttctgggcccagttttaacgcccagaacttcaggcatctgtggtcccagggacccgagaatatccaatcgcttcaaaagggataaggaggctgggcgcagtggctcacgcctgtagtcccagtactttgggaggccaaggcgagaggatggcttgagcccaggagttcaagaccagcctgggcaacatagcgaaaaacacaaaaattagctgggcgtggtagtggtggtgcacgcctgtagttccagctacttgggaagctgaggcaggatgattgcttcagcctgggaggtcaaggctgcagtgaggtgtgtttgagccactgcactcagcctgagcgacatgacaccttgtgtctgtctgtctctctctctctctcacacacacacacacacacacacacacacacacacacacacacgaaaaaaaagggacaaggagtcttagattcctctgcctggcctctccttcctcagtcacaggagtcctggtccccagcccgtccctgcaggagtcagacatccatgcagtcctgtttccctgctgagggtgtgggcctcaccagcataggcgctgacacacttggagagcacactgaggggcagcaaggggtccatgaggctcagcaggcgggagggagaggcggcaggctgcagcattgtggccgggtaggctgccatgatgccatctggcacccgcaccccgtaggctgctgcccgaagagccacggtgaagcagaggttcccgcctgcactgtcccccgcaaggcagattcgttcccctgttgagcctggtttgggagaggggtggttggtgacaacctggcaggggcagaggcctggggaggagggcagggaggaactcaagctgggagaactgggctctccaaggtggggtgtggggcactccaaggcctagcagactgcagttttagagactggcagactgaggcacagatttgggctcatgtggtagacagagggtcaggatgactcaggacctggagaggcccagggaagcactgggaaagtctgtcggggctggaggttgggagcagggagggcaggtggtgggaaaggggagctgagctcaggcctgttgcaggaggggggcctcagagggcgggaatggaaggtcagggttcagggtcagtacagaggggctgggctgcaagctctgtgccctggggcatggccacactctgctctgtgcctcagtgtcctcccaagatgttgatcttcgaagagggaggtcagagaagctggactgtgggccaggaggctggtaggacaggagagcagggcctggagctatcagagggggacgacagaggcccagggagacaggacggtgggtgggaagtggaggtggaggagatggagagtctgggtgccacagttggggacagaggataaagtggctgaggtggaagattgggcaggacctgggtgagcaggagctgggaggtgtggggggagagaaaggtagagggtgtgaggctgaggctggaggagcttaaagcaagctgggtgggatgggagcaggcgcaggtggctgtgggggcctgaggctcaccaaggagggcgcagtgcttgatggcccagcagtaggcgaagaagcactcctccagcgcacgggggaagggggcctcaggggccagggagtagtcgatggagatgatgggggcgcccagctcctgggcccagctcttgaggtagggctcgtgggatctggaggtctgggccacaaagccaccgccgtggaagtgcactatcagggaccgcgagcggggtgcctgctgggggcgcggccacagctccaggctccgttggccgttggactttatcaggctgctgagctcctcactgtcctgggggtgaggagggagacggtgtgtgaggttggggagagctggccagggctgcacccctccatggggatgccaaggtgggggctgcccacgctcctcggctctgtccctgtccctggctgaggctggaaccctacctgtccttcacgcaggtcataggagatgagcctgacgaggacgggcccagggcctgtgtgggccagtgggggtgagatggtgaccgtgagcgtggggtcggcagtcagtggcatctcaaaggcttcgggtggcaggctgagcaggcggcttaccctcacggtggccgatgccatgttggccagagactggagggaggggacagaaggggtgctagggaaggtctgcctgcaggggtgcccttcacctctccctctgatccccagtctttccccttgtgtgccatccctgggcctggagccccacagagacctactgtggcctcagatgagtctctgggcctcagtgtccccatctgcaacaggccctcaccgatagcacttccatctcggtgatgttccagaaggctttccagaagtgcacgtccaggttctgtgtgatccgctcaaactcagccccacgcagctcggggtcgatggcaaagcggccgctggtgaagagagagctggcggccacacctaggggtcagaaggggtgtcagggagccccagtgggtcaggctgcttgggcaggagtggggaggagggccaagagagtaggctgcgagtagaacctggctgggactcactgaggcctgtctcgttgcgtttgtagtgctccccgaaggacaccagcccaatggagatggtctgcaggaatggccggatggcaggcgtgaactgtggagagacgcggctgcgtcacccaccgctcaagagagggatggggacagggcaggagcgaggcacagggatgtgcggggaagacacattcattcagtaaacgtttcatgagctcctactgtgtgctgggcatagctctcggctggttcacggacctgatgttctcaaagggaaaacaaatgatcagcagataagcaaagccacgcgcagtatcatgacaaggaatgacgaatggtttggaaaaaaaaaaaggcagtaggtggagagggcaccagtgatgactaggggtcaggctacttagcgggtctcggaggagagatctgactgaagcgaggggagggtgttccctgcacagggaacagagagcatgaaggcttaaaggtgagctcataggaggctgaggcaggagaatcgcttgaacccaggaggcagaggttgcagtgagtggagatcacaccactgcactccagcctgggcgacagagcgagactctgtctctaaaaaaaaaaaaaggtgagctcatgcttggtgcttgacctgggtagcgacagtcagggggccagtgtggctggagcagagtgagcagtggggagaggggcaggtggtgacattggagaggcaaagggggctcatatagggcctgggcagaggaatttggatttcattcccagtgcggggtggtgccactggtaggctgtgaggtggggagtaggatggtgcagggacttcctgaaagtcagagagaggatggatggggagaggaggcagctggaagacaggaacagggagatggccagagacagccccccaggcacagggacctgaggcagaaagacagtcagagagggagactgaggcctagacataggaccagccagccaccacgggggcagggagagacagcgtctgacagagcagacaggcagttaaggaaagacagtggggtccaggtgcagtggctcatgcctgtaaacccagtactttgggaggccaaggtgggtggatcacttgaggtcaggagtttgagaccagcctggccaacatggtgaaaccccatctctactaaacaaaatacaaaaaaaaaaaaaaaaaaaaatacaatggggacacaggattagaggaaatggagccataggaggccaaggcaagggattggcgggttcttctgttcactctgtactggccaagttcctactgcatgctagacactgggctggagcagtgaccaagacaggggaggcctctgccctcccggggacggacattttaaaggggagactgccctgcaccaaggcagagctgggccctgcccctggctgtgcgcccagtaggccagagggcacctgatgcctggctattgtggctgggatgctggtttgggcagccccgggatctctttctcatgactctagggtcacggctgggacacagggaggagctggctggcccagctgggctgatcaatacttgtgggttcagccctggtgaggggaggtttccaggaatgcctgggctgggttgctgaggataggctagcctgaagggaagcctggagatgtggggtgggagggggaggctgaggtgcggggaggcccagagagggccagaatgactatagggtcacatggctccagatccctccctgaggggtctcaaactcaagtgacttcaggggccagacaggtaacaaagagtgaatacatctcttgcatgtaggacaatagagagtagtggatatcctggtgaaaaaagctctgcaagttgcatttcttaccacctagcagatatgacctagggaccatgagtttgagacccctggtgcagctctgtctgagctccagccaacttctcctttctgtacctgctgtttgctgagtccgataatgctgaccactggttactttaccatactataggccaggccaggggccaccaggtgccttcattgtgggcccagaggggcacggggcagggggctcacctggaagcccaggcagcggccatagaagcatcccttatgcagcgtgacatactcccggaggaagtcggcggtgagcccctcgtcgccctcaaagaagagtacccccggccgattggtaaccagcaggcgctgggcgtagtagaccagagcgcggagctgggtgagggcagccaggtaggcctccagctcggccaggttgtggctggtgcggaagaagatgctgcggcggttggaggccacatagcgggatttgtgcaggaggtgcgccaggcagcagcgggctgtgtgcactaggctgcggtacccgttggccggtgtctctgggtccaggtcaaagaggtgcgccacacccagcaggcggcccagggccggctccagccccagcgcctgctcccgtacaccggcaaaaacgcctgacagccgctgggccgtttccccaggaccctggctcgagaagaaggctatgttgtcctccgccagagtcaccagcgactgtgtcattgtgcgcaggtccatgttgtggatgagccttgaggctgtgggcaggtggggaggcctgttaggtggggctggatcaagccttgcttagctggggcccaggagtctgggccatagcttacccactcctccttcaaacctcagtgctgtcttctttcagttccaggggcccaggaccccaggttcctcctcccttagacataagaggtcaccctcttgtctctgggaatcagaagtttggggccccagttcccagtgcctttgtccctcctcgggagccaggagtttgggccctcagctccctcctccctcagacccaggagtccaagccccaagcccttcctcttcaggacccaggagcccctgctatcacctctttgggactcagaaacttgctgccctggcctcctgaatccggacattccctgagcccacacgactctgcttccctaactcattcacctctcctgtgatccaggaggctgccggtccttctttcttccttccaggaacccaagagtctagtcacctgtctccatgaattctcctggggcccaagactccttctcctagattccaagaagtctaaacctccagttggtccccattctcaggacccaggagtccgggtcccccatcccatctttccttcttaggccccaagtgctacccataggcccttcccctccaacaacatttgggagagttcagccccagccctcccattcccatctctcgggaccctggtccccaagcgcagctctccctgaactcaggagttcacaattctagacttcactgaagagtcattcctcatccttcaagtctggctgtggaaccccctccaaatcccagttccctccctgtttctctgtgagatccccaaaactcagtcttgcttctcccccagtggggtcccctggccttcaggcttgtccactggtcctgggttgcatggccggccctgctcccctgcctggaacagcgatactcatcactggtgtcgaccttgagcatatccgtgcaggtcccgtgctgagagctttctgtgtgtttgctgctttagcgtgctaaccctctgggacccacaccacctaggttcaaatctctattattgccagcatccccattttacaggagaggaaactgaggctcaggttttaagtgaggaggttaaagttgcactgcaagtggcagagcttttgtaaacccagctctctgggtccacagccacacttatgtggggctccccgctaggactctggaagccacatctcaaaacttgccctggactacgtctgatctccacactttccagtccccagtgatctttcctctgatatcctttcccagccattcaggctgccctgtttcttggatgccctgtcacccaggtcctgaacaagctgcccttggtggaatgctaccatctgctccagtgacttccctcccaaagcccagcaccttgcctgttcccctagaagaaggtatttcctttcccttctaggtcctggggcctggcagcggccattcccgtctctcagctggctggacactcacccctcctaggcatcttccgagcttccctgggctgggactgctggtctgtggcttgtgccagtagcagcctggggcaataaacccgggggcggggctggcctgcccagggtgtagccgcacaagccacctcccacccagaaagatcagtgaggaccacgtgctgtaaacagagtagagggctcagctccctgctctgccccccacctgctcccagactcagctcaactggtagtcctgttacaggctcctctgccttagaacccaggagtccacacccacagcccctcctccctcagacccaggagtccaggcccccagccccttcatcctttaggacccaggagtcctagccccagtcctgaacaaaccgtcccctctcacccagccaggctgccctctctgtccccagagaggactcagggagccaaaggcccagtgatctcagctcccgcctcctagtctggccctggcacagccagccccagctgttggggggagagaggaggtagccagccctgcctgtccctcctggaaggacaaaagccgattaagggcagtgccaggctcagctaggggcctgagctgcctgtcggtcctactgggtggtgtgaccacactgggtaacctggacctgccacttacccctctcagcccaccctgctgtgactggcatccccacctcacacagggaaacagaggctcagagagagagattcctcacccatgtcattcacccgtgtcattccacagattccttgtctggcctcagcttgtcacttccaagaggtactccccagttgcttctccccagctaagatatgcacgcccccgttattttctgccatgatatttagttctgttccatcctgccatttgacactttataatttgtttacgtgtttgttcatctcccccaggacaggactaggttttatggagccatgaaacttataaggtaccggggtgtggccctttaggaagaagaaatacagaattacaaatacaagattagggccttgggccaggcgtggtggctcacgcctgtaatcccagcattttgggaggccgaggcgggcggatcatgaggtcagcagatcaagaccatcctggctaacacggtgaaaccccgtctctactaaaaatacaaaaaaattagccgggcatggtggtgggcacctgtagtcccagctactcgggaggcggaggcaggagaatggtgtgaacctgggacgcggagcttgcactgagccaagatcgtgccactgcactccagcctgggtgacagagcgagactctgtcttaaaacaaaacaaaaaagattagggccttgaaaggggcctgtgtgactgaggggctctgaggcctcagggtcatttgcttggctggaagtgaatcttctgtcccggactgtcatcccccaggtggccctggggcctatcatgggacctggcacatagcaggtgctcagtggatatatgaagcaggaaggaaggcatgaagaagcagagcgagggcagaggggctagttagctcaggagaggacggcccctccccagggctggcagacagatggatagacagaggcctcaggaggcagtgttaggcttgcagctgtgaaaatgggacgatgtgggctaggcacagtggctcatgcctataatgccagcacgttgggaggccgacgtgggtgggccacgaggtcaggagatcgagaccatcctggccaacatgctgaaaccccgtctctactaaaaatacaaaaattagcggtatggtggtggatgcctgtagtccccactattgggaggctgagacaggagaatcacttgaacccaggaggcagaggttgcagtgagctgagatcacgccactgtactccagcctggcgataaagcgagactctgtcagaaaagaaaggaaagaaagaaaggaaaggaaggaaagaaagaaaggaaagaagaaaagaaaaggaaagaaagatggcccaagcccttgctggcgaccctggatgagtctgttttcctcatctggaaactgcacttggctgttctgctggctcagggtgggagacataatttataagtggggccatggccggcatgttctgcatgtggtttgctttgtgggctcacttggccttcctgagatggtgtattgggtgatttttctctgcggcacttgtcaccatctagcatactatacagtttactacaggaataccttgcttcactgtgcctcgcacatactgcattttttacaaattgaaggtttgtggcaaccctgcgtcaaaccagtctgttggcaccatttttctgacagcagttgctcactttgtgtctctgtgtcacattctggtaattttcacagtgtttcacactttttcattattattatatttgttatgatgatctgtgatcaatgatctctggtgttactattgtgagtgggggcaccaccaaccatgtccacgtaagagggcgaactttaccgattaatgctgtgtgtgttctgactgctccactgaccagccatttcccccatctctcttctcgagcctccatattccctaagacatacaatattgaggccgggcacggtggctaatgcctgtaatcccagcactttgggaggctgaggcaggtggatcacttgaggtcaggaggttgagaccagcctggccaacatgctgaaaccccatctctactaaaaatacaaaaattagctgggcatggtggtgtgtgcctgtaatcccagctactcgggaggctgaggcaggagaatcgcttgaacccgggaggtggaggttgtagtgagccaagatcacaccattgtactccagcctggaaaatagagcgagagtctgtctcaaataaatgaaatgagatgaaaaatagaataaaataaaatagaaatcaggccaattaacaaccctacaatgacctcaaagtgttcaagtgaaagaagagtcttatgtctctcattttaaatcaaaagccagaagtgattaagcttagtgaggaaggcatgtccagtgctgaaacgggctaaaaactaggcctcttctgccagttagctaagttgtgaatgcaaaggaaaaattcatgaaagtaattaaaagtgctactccagtgaacacatgaatgataagaaagtgaaccagtcttagctgggcatggtggctcatgcctgtaatcccagcactttgggaggccgaggcgggcggatcacgaagtcaggagatcgggaccatcctggctaacacggtgaaaccccagctctactaaaaatacaaaaaatcagccgggcgtggtggtgggtgcctgtagtcccagctactagggaggctgaggcaggagaatggcgtgaacctgggaagcggagcttgtagtgagccgagatcgcgccactgcactccagcctgggtgacagagtgagactccgtctggaaaaaaaaaaaaaaagtgaactaggcttattgtggatatggagaaagtctgaacggtctggatagaaggtcaaaccagccacatttccttaagccaaagcctaatcccaagcgaagccctatccctcttcaattctttgaagggtgagagaggtgaggaagctgcagaaaaaaggttggaagctagcagaggtggattcatgagatttaaggaaagaaggcatctctgtaacataaaagtgcagggtgacggccgggcatcgtggctcacgattgtaatcccagcactttgggaggctgaggcaggtggatcacctgaggtcgggagtttgaaaccagcctgaccaacatggagaaaccccatctcaacttaaaatacaaaaaagaagccgggcgtggtggcgcatgcctgtaatcccagctacttgggaggctgaggcaggagaatcacttgaacctgggaggcggtggttgcagtgagccgagatcgtgccattgcactccagcctgagcaacaagagtgaaactttgtctcaaaaaaaaaagtgcaaggtgatgtagcaagtgctgctggaggagccgcagcaagttatgcagaagatctagctaagatcattgatgaagacggctacattaagcaacatattttcagtgtagataaaaccaccaggtattggaagaagatgccatccaggactttcctagctggaggggaggtcagtgcctgggcgccaaagcttcaaggccaggctgacccccttgttaggggctaatgcagctggtgactcagttgaagccggtgttcatttatcattccagaaattctagggccctcaggattacgccaaatgtactctgcctatgctcttaaatggaacaaagcctggatgacagcacgtctgtttacagcatggtttactgaatatttcaagcccactgttgagacggactgcacagaaaacaacaaaatatttctcaatgacaatgcatgtggttaccaaagggccctggtggagtagattaatgtgttttcatgcccgctaacacatgatctgttctgcagcccaccagccaaggagtaatttcgacttttaagtcttgttatttgttattattattatatttttttgagacggagtctcgctctgtcgcccaggttggagtgcagtggcgcaatctcagctcactgcaagctccgcctcccgggttcacgccattctcctgcctcagcctcctgagtagctgggacgacaggcgcccgccaccacacctggctaattttttgtatttttagtagagacggggtttcaccatgttagctaggatggtctcgatctcctgacctcgtgattcgcctgcctcggcctcccaaaatgctgggattacaggcgtgagccactgcgcccggccaatttcaacttttaagtcttattatttgttattcttatttttaaaatttttagttttagagatggattcttgctgtgtcacctgggctggagtgtagtggcacgatcatacctcactgcagccttgaacttctgggctcaagtgatcctcctacttcagcctcctgagtagtggggactacagatgggcaccactatgcctggttcatttttttttttccaggtttttagagacagagtcttgctatattgcctaggctggttttgaattccaggcctcaagagatcctcctgccttggcctcttgagtagctgggagagtcactgcatctggctaattttttgtgttttttaagagacagggctgtgttgcctagcctggtcttgaacactggacctcaagtgatcatcctgcctcagcctcttgaatagctgggattacaggcatgtgccaccatgcccagctctaagtcttattaaataataaaaaatagaaatacatttagaaatacattttgtaggctgggtgcagtggctcatacttataatcgcagcactttgggaggccaaggcaggaagatagcttgaggccagtttgagatcaacctgggtaacatagtgagaccctccccctctacaaaaaataaataaaaaaataaaaaaacagaaatacatttgatagcaggaacaatggcaacaaaggatttagactatgacatagacttggctgatagagcaccagcaggctttgacaggactgacccccatttttttttttttttgagacaagtttcgctcttgttgcccaggctggagtgcaatggtgcgatctcagctcaccgcaacctccgcctcccaggttcaagtgattctcctacctcagcctcctgagtagctgggactacaggtgcctgccaccgcgcctggttaattttagtatttttagtagagacggggttttaccatgttggccaggctggcctcaaactcctgaccttgggtgatttgcccacctcggcctcccaaagtgctgggattataggtgtgagccaccgtgcctggcctgaccccaattttgaaagttctactgtggaccaaatgctatcaaacagcatcacatgttacagagaacagttttgtgagtgaatcgaagcagaaaagttcattgttaccttattttaagaaactgccacagccactttctacaaccaccaccctcgtgagtcagcagccaccaccactggggcaagaccctccaccagcaaaaagatgaggatttgctgaaggctcagatgatcattagcatagtatggggccaggcgtggtagctcatgcttgtaatcctggcactttgggaggtcaaagcaggaggctcacttgaggctaggagttcgagactagcctgggcaacatagtgagattccgtctctacagaaaaaaaaaaattaaaatatgtacatggtatttttagacatatgctgttgtacactttaatagactacaggatagtgtaaacataacttttctatgcactgggaaaccaacaaatttgtgtgactcactttatcaagtggtctggaattgaaccccaaatatctctgagacatgcctgaatttatattgtttgctctctgattccctcactagattgtaaactccctgagggcagggacttttgccttttttattcagcctttggacagtgcctggtgcactgccgccccttggtaaagtggtagcatccatgccggtagggatcttttaagatgaggagtgggggccgggcgccgtggctcacacctgtaatcccaccactttgggaggctgaggccggtggatcacctgagatcgggagttcgagaccagcctggccaacatggagaaaccctgtctctactaaaaatacaaaattagccgggcatggtggcgcgtgcctgtagtcccagctactcgggaggctgaggcaggagaatcgcttgaacctgggaggcagaggttgcggtgagccaagatcacaccattgcactccagcctcggcaacaagacagaaactctgtctcaaaaaaattaaaataaaataaataaaaagatgaggagaggggacatttccaacaaaacaagtgactgcacaaaggagtggggaaggggctggacccaggccctagggactccagagctctgccctttgtcctgttccaggcggctccccgaggactgggctgggtggagctggcaggaagggatgctgaggttgccagcaactcgccaggaatccctggcagagggcactggggcaggggtaggcccactggggccgtgggtaaggactaggggagaggtagggcagaggggatttggctttgggtggtgtcccactgactgggcactggacctttctttgccctgaagagtttctggacagctgaatccgactcctggggactgagcaggggtaaggagggcggtggggaaggaagtggggtgggggtggatgggggatggaggaagggccaggtgtggggcctgggaggaagcaaaggcttctgaagccaggaagcctggaatcagatgcaggtggggacaatgagtggctggatccccgagagtgtgtgcataaaagagcaaacgttgcaccaacagcctctgcgtgcctggtctctttctctgtgcgtgtgtgtgtttaatttaaaaatagggatcgagtctagctgtgttgcctagactggtctcgaactcctgtgctcaagcaatcctcctgccttggtctcccaaagtgctgggatttcttttcttttttttttttttttcattctcaaaggaggtgatgagatttctttatgtgttttatgtgaagtgactcatgtcgcctgccccacaacctatgagggagagaccattatcatcccttttggcagatgacaaaattgaggcacagaaaggtgacataacccccggggtcacacggccagcagggggcagctccagggcagagctgctgatctctgctgtgtttctgtgtgctgctccctctgtctgtgcttcaaagtatatgctttctggtcgggtgtgagtgtgtctggggttcacgtgtacatatgtacctctgcaggtatgtgtcatggctggcgtgtgtcctggcctgtgtccgtcggcactggtacatttgaaggtatgaatgtttgtatgcctgtgaatgtatctgtgtctctgtttctcttggcctgtgagcttgtgtgggcgtgtttgtttatgtatgaatggatatacatgcttgtgcgtgtcttggtctctgtgtgtgtgttgagaacaaacctctccccatttgctcaagctggaacccaggatgtcatcctggccacctccccaccccccaactcccatgcaatccatcccctagtcctgcccactatgcctactaaaggcctctggaacctggcccttctccccacctccactgcctcctccctggtccaggcggtagcatcattacctgggtgactatgacagatctttatatatttctgattttgttctctttgatttgttgtccacatagcagccacaggatctttttagcacacaaatctgttcacacacttccaacccttcaacaccccctcccttgctttcaggataaagcccccaatcctgcacatggcctcccaagccaggtaccatcctcctctctctctctctttttgagacaaagtctcattgttgcccaggctggagtagagtggtgcgatcacagctcactgcagcctcaacctcctgggctcaattgatcctcccacctcagcctcccaagtagctgggactacaggtacaccccaccatgcccggctaatgtttgtgtttttggtagagacggggtctcgctatgttgcccacgctggcctcaaactcctggactcaaggggtcctcccaccttggcctcccaaagtgccaggattacaggtgtgagccgctgtacccagctaccatcctcctctcttaaactgcctgccctgtttcctcttcctcttcctcctggccctggctgagctccctctgcactgtaactcagtgtttcctcaagcctcgggtctttctccatactgtcctctctgttcccctgcctgccccctgcacagcacttaacgcctgtccatcttgggtccaatattgcctccttgggaagcctctcaattctatcttcccagggtgtttttctctgttgtatttatcacagtttacaatcatagtcttatctgagtaatatctgtgtccccagctcaactgtgaatctgtcagcccaggcctggcacagctcagtgttcagtgaatgtctgctgaatgaatctgtgtgactggaacctcttgggcccagaatcaagtttgggcccacagcagttgtgcgtccacaaactccctgccccgaggaggctgaggcagccatctctttgccctcactggccaagtaaggaagcccaggcggccttggtccctcagagccccagtgtcgtcatctgggaaatggggtgatcctaaggacactagcctcatccagttactggcaagatgaaactgatgacgaggattgctccagccagcccagatgcccttgaggcaggagtgaggtctgattaatttatctaaagcctggcacgagggcggggcttcaggaaatgacaggcaaatcttggagtttgcaggaatgagcctttgtgaatggctcgttttgcagggagccctgcccaactggattctgactcctcatgacaaccctaagggaagcgtgattattatgatctctgttacagttcacacattccttcacttattaatccaataaatatttgagtgcctatttgcctggcataccaggctctagaaatacagggtaaacaaggcagatacagccctgcttttaggatgttcaccgtccggtggggactaacagtaacaataaccttcacttctcctgagggtttgctgcgtgcctgtgccaaacgctctacattcattctaacctcacaaaaggaggtactcctatcatcatacccattttagagctcagaaagctgaggcagggaaagagggagtctcctgcccagaacatcacagctcccagcctgaggaaccggatctccgacgcccacgtttcttaactacagtctgtactgcctctgggtatgctatactggtgtgaggctcagtgtcttgctgtgacagcgagtgcccttgggctccagtccgtctgccctctgagcctgtctgagcctgcgtgtgtctgaagccaactccaggtctattctgggctaatgatgtgttctacggcaggggaagcaatgagtttggggtccctggggctgaggggtggtgttagtttccttcctgcatgggaacctcccacgggtccccatgctgattgataaatgcttgtaactgaggacctgcccctgcctgaggcttgcagcatttctgttggtctgtcagcctttgttccgccttttgagacctgaaaataatgtgacaccctagagaaatgaggccttcccttttgctgaggcaggtgtggaggtctgaagccaagccagggcccgttgtcctggaaagggtaggggtcagggctaggccccagtggagccggctgaagcgggttgactgacaatgaatggatggatggatggactgacttgccgggtgggaggccgggactgcgatgaactttactggccccgctgcactctccactatgggcaccccttcctcctacctctccttgactcaccgctagacttcctctttgagtaacacctgctaacctccttcccccttatcctctcaagagcgctggagccctgaacatcggcgcttgaagcattccccaggtgggaaacactgagggcatccgttgcccttggtcacacagcgaatacggaatccgagcgggaaccctggtccacgaagctcgcattccggactctgctcccaagccgatccgggcgtcagctagtccctgtgccagggtgggcctctcggctgtcacatcacccccttctcacaatggatcatcccgttgtccccgcaagcggcaatgggccagtccgcggacccccccaactccctgtggcagtgggccagtccacgctgtccccactgccccgtaggatgtacgaggttccttccgggctgctgccggtctccgcgcgctcacctttggccttgtcttttcgccaccgccggcgaccgtggctccttgagccctctttggcattcttcgaggccggggccatagcggcctcggcgggctccgttcccccggccaactccatcaattccccgcggtcctcccgcgggggccaattccagccgcgaggccctgcccggagggccaatcctcgctacacactactgtcgggcccccctattacccaatcccgagcttgctcttctctgggtccagctccctaaccaattctggtctccctccgctgccgtgctccgcccccaaccgccagaatttaagatctggctccgccccctaccgcgcattaaagggctcgcggccaacaaaaaggcaaccccgggggtggcgaaaagcgtccttcgggcaggactagtgcggagccccgcggggagcaccccagcagggaagtcccgatcttcccacgtgctgggaagcctcccatgtgctggctcagtctcgccatcccactcaccttcccagggagggatgccctagcacgcggcccggcccgccttttgaagggggaaagtggggcgcctctgagcctctgcctggggtgggggcgggccaggtcctctgccaactcaaagacgaggcggggcgccagcgctggaggcgtggctgtgcctgagagccgttggaggagggagccccgctttccctctcctgtctcctagttctcctattgcgcttttcctgggggatctttctccctctgtctccgccccctaatccatgctcccgataatgagggtgggggatggtggtaggagaacgctcggcgcctgcgcactagcttcaggccgcgggccggcccaagagcggaggtagagggaacgacgcatgcttgagaaatggcgggaaacagaggaggctcgaggcttgctcacacgcacacagccaactgcttctggaccgccttgctcacacgcacacagccaactgcttctggaccgcctgaaaggcaacctcgcccgccgcggtggtgtggggcgggcatcccttgagactgtgctctggaggcctggagaaacagctttctatcctcagcactggggagagcaggcctcaatccctgcctttgcctgccgcccctcttccttccctctcaaagcatacccagcagccccggcgctgagaaacgcgttactctcttatcagctgtgggagagacaagacagactggcctctgggcggaggggccgccattgcctgccctctggaccagggcctcacagataccctcagcttcaggattagggctgcgttggtttttccccccacatcaggggacttcaacaagtaacctccagttccatagataaaacttgtattccccccttctccatggcaggggttttgagcctagagaaggaagatcggagcttcctggggctcctgtgaagcaggcagggggcagcactgggccccgggaagaggcggagaaggcgagggagtgcctgcggtgagcccagagccttgggcccgttatcctctgatgctgctcccccaactttcctgccgtcagtccctgaccttgcctgagaccttggcggctcccgcacctctctcccggctcctccttgctgagaacacaacccgcaaggcccttccgcctggctggactgagtcccctatggaggcagcctggcagggagcaggtatcttcctggcagaagaggacagacctggtaaactgagagactgttgatgccccaatgttctgcctagcctgcctggaaactccagaagggtaaggtaccgtctttgtattgtattgctgggacttacgcccgtgtctaccccagagctggtgctcagtcagtttctgtggatggatgaatgaacactggcaagagggccgctttcctggtctcctggtccctagctcagagtgccttcccactctgggatttgattttccccaaatcctctatagggaggcagcctggtccaggggagaaagaccccggcttcaaatcctgactttgccacttcctaactgcatggccctgtgcaagaacccttacttctttattttctacctgatgtcctcatttctaaaatgaggatgttggccaggtgctcggtggctcatgcctgtaatctcagcactttgggaagctgaggtgggaggcttgcttggggccaggagttcgagaccagcctgggcaacatagcgaggccacgtctctacggaaaatgtaaaaattagcggggcatggtggtgcacttgtagtcccacctactccggaggctgaggtatgaggatcgcttgagcccaggagtttgaggctgcagtgagccatgatcataccagtgcaccccagcctgggcgacagagtgagactttgtttttttctttttttgagatggagtcttactctgtcacccaggctggagtgcagtggcacgatctcagctcattgcaacctttgcctcccgggttcaagtgtttctctgcctcagcctcccgagtagctgggattacaggcacctgccaccacgcctggctaatttttgtatttttagtagagacggtgtttcaccatcttggctaggctggtcttgaactcctggcctcaagcaatccatctgcctcggcctcccaaagtgctgggattacaggtgtgagccactgcgcccagccttttttttttttttttttttttttaataatggggatgttgatctttatctcaggattgttgaaggatgaccagagctaacctgatacaccgtaagtttttagtattttttaagtaaatgaatgactgtccctgagaggcttcaattcctccagattcacactcacctgtatcctggtagtgtctgtgattccgagcactggttttctcatgtggcgacgtcccactgtatcctgacatcactttataaccagattttcctttgaagcctagcttcactccctgggccaccattccacccatcgtggctggagaatctgtgtctgaagatgatcccacatctgattctgactcagaatctgtgacccactcagaaagtgccttccactctagggctgatcgctgtatggatagttcctgaagttttgttagaaatcccagctctgtcaaagatccctgcttggatttggctccctggactggcgttgtttgcttgtctgactgttcaggtgtctcttgggacgtagattcagtcggggcagatggctcccttttggctccaggtttagcctgggccgcaggtgttgattcagcttcttgttgagctggaggtggctctcctggcccaggccctggctgggctacatgtctttgtctcaatgctggctcctgttgagttatagattcttttcctagcccaggtccctgctgggaggcagcttcctgttgagtgagcagcaccctttggatgtaaggtgattgctgtggtgcgggcttctgtggggcaagaaattcctcttgtgaagcagatttttgttgggctctaggttccttctgggattcagcatcatgttgtgcaggggtctcctgctgggtgaggggtctttggtttgaagcaggcttctgttgggtattggatccctgcagagtcttcgattctggctgggctatgggtgtcttttctggcccaggctctagcggggttataggcctctggtgtggttcaggttgccagtctgacctagacactgacttagaacctggctccattgttatttccctcacgggagatattgatcttccaggttctatccttctgggctcccacccagccctctctcttcacagatctctcattgattcctcatgatggcacttcctcttgggtttcactccatcctagcatcactggtcttcctttttaaggcagctggcagttggccgatcacagctggcccccactaagtaatgaactctgtgcctctttctttggtgggaggattaggaataggaggaggctatgtgcctagcactctcttacaagaagggaggggcttgctctcttgtgtcataaatagggccccaccccacccaccactccgttaaaatgtttcttctcataaggcaagcatcccaatttaggcctccgtgtcatctgggatgacagaagccagatgctggatgagtgttccttttttctctttccttctaatgtctgaggaaagcgtcattcagggggcagtctctgtagttgttgtaataattatttccctctttgttcattcctacaaatggttgccagattatttatttatttacttattgagacaagtctttctctgttgcccaggctggagtgcagtggtaccattttggctcactgaagcctccacctcctgggttcaagcgactctcctgcctcagcctcccaagtagctgggactacaggcgtgcactgccacgcccggctaatttttatatttttagtagagatggggttttgccatgttggccaggctggtctcaaactcctgaccttaagtgatccacccccaccccccgcccccgggcctcccaaagtgctgggtttacaggtgtgagccaccacgcccagccaggttgctagtttaatttccttatattgtcattctgatcatttaactctcatgttaaaaactaatgtcatgccttcccacttttatagcttgaggcccttctgaatggcatttgagatactccatgccatctctctagccctgaactatgatcctgtactagattggaaactcacagaagacagtgaccactgatgacaatgactgataatgatggtggtaatggtgatgatagtagtcataaataccaaaggctgcctaagtgctaagaaactgtgccaagttttttttttaaacctatattatctttaataagaccgtgtctggttcattggtatgcttttttttttttgtcccacctcgctcttacctcagaaagatttgtcgaatgagtgaaagatgaacaagtaggccaatggagacagagtgagggtcttggtggggataagtatgtgtagaatctggattcagtctgcagtgaatagggtaaaatgggtcatctggttgtgaattggcagaccccatttgaaggaaacaattttgatctgtgacatttaaaaatatttattgacttctgtttgctactttcctgattgcatttaaggttaaatgacactagctaggaagctacagtttcctggaatctttcaggtaattaagcctaagcctgggtaaggggagggcacaggctaagactgacgagagaagaagacactagagagagcaacaaacaaaatgatcttgaaaaacatgctttttgagagcactggaatgatttaggggtgggtacagtgggagagtgaggtgggagaagaagagtgtctggtaggtgtgctcactgtcttcttggctgagaatgtttaattggaagagtgggcgctcagagctcctacaaaggcagagcaaagcttcttagctgacattgtttgagaaattgctggcaggctctggaatgcttgtttggctttctgtggtgcctttggtgtcctagggtgcaaataaaggggagaggctagtgttaaaaccatttttaacatttcttttttttttggagacggagtcttgctctattgcccaggctggagtgcagtggcaggatctcaactcactgcaacctctgcctcccgggttcaagtgattctcctgcctcagcctcccaagtagctgggattacaggtgcctgccaccatggctggctaatttttgtattttagtagagacagggtttcaccattttggccaggctggtctggaactcctgacgtcatgtgatccacccacctcggcctcccaaagtgctaggattacaggcatgagccaccatgcctggccttcacatttaatttttttttgagatggagtctcgttcagttgcccaggctggagtgcagtggtgcaatcttggctcactgcaaccactgtctcccagattcaagcgattctcctgtctcagcctctcgagtagctgggattacaggcacccaccatcatgcctggctaatttttgtattttagtagagatggggtttcaccatgttggccaggctggtcttgaactcctgacctcaggtgatccacccgcttttgcctcccaaaatgctaggattacaggtgtgagccactgtgcccagccaacatttaatttttatgagagttttaaaaattataaaaataagactcatccagtggaaaaaaattttaaaatccagtaaaaagtaaaaggactcctcccaccccagcctctacaacacattttccagggctaaccactgttaatagtttgctacgtatttttccataccttctggtatataaatacaatggtttattttaaaaacaaaaatgagattatactatacgtattgccttagtcggcacctttaagaaatctggccgggcatagtggcttgtgcctataatctcagcactttgggaggccgaggtgggcagattgcctgagcccaggagttaaagaccagcctgagcaacatggcgaaatcctatctctacaaaaatacaaaaattagccaggcatggtggcgtgtacctgtggttccagttgctggggaggctgaggcaggaggaatgtttcagcccaggaggtgagccgtgatcatgccactgcactccagcctgggtgacagagcaagaccttgtctcaactgcgcccctccctctgcaaaaaaaacaactgaatctattattgcaaagtattatatatctatagaagttcatagaaacctatacatgcaattcaataaatagttataaagcagatattcatgaaactactacctaggcttagaaatagaatattgtgtccgggcacggtggctcatgcctgtaatccctgcactttgggagcccgaggcaggcagatcacctgaggtcaggggttcgagaccagcctgaccaacatggagaaatccatctctactaaaaatacaaaattagctgggtgtggtggcgcatccctgtaatcccagctcctcaggaggctgaggcaggagaattgcttcaacccgggaggcggaggttgcagtgagccgagattgcgctattgcactccagcctgggcaacaagagcagaactccatctcaaaaaaaaaaaaaaaagaaagaaagaaagaaatagaatattgccaacagcacccctccttttctgatcactgctttctctccccctcacagtgataatcttgacttttatagtaattatttactttcttttctttattatttaccacctatgtgtatagattcctaaataatttagtttattttttctcatttttaaactttatgtatatattatggtctgaatgtttatgtctctccccattttttttgtttttgtttttgagatggagtctcactctgttgtccaggctggagtgcagtggcgtgatcttggctcactgcaacctctgcctcccgggttcaaataattctcctgtctcagcctcctaagtagctgggattacagatgtgcaccatcacgcccggctaatttttttgtattttaagtagagacggggtttcaccatgttggccaggctggtctcgaactcctgacctcaggtgatccccctgccttggcctcccaaagtgctgggattacaggcatgaaccactgcacctggcctcactttagttttaattcacattttccttgtaataataaggttgagtgccattgcatctgtttattagctgtttgggtttcatcatctgtgaagtggctattcaagtatttttgcccgtttgtctgttgtatttcctgccctcctctcactggtctgtagcaattccttatatatgtattctgaatactaatcctttgaaggttgtgtatgttacagatatcgtctcctatttggcagcttgtcattttattcttttgatgatcaaaatttcataatctcagtgaagtcagatttatttactcttttactttatggtttgtgcattttgtattttgtttaagaaaggctttcatacctcaaggttgtgaatatattctcctgtatttccttgtaaatttgtctttcaaatttagatctgtaatccacctgaaacttacgttaatgaaggatgtgaaatagggggtctctacatcatttttttttcattaatatattgtggatatctctccagccaacacataatgatttatctcattattattattattatttttattattattgttattattatatttattttagagacaggatcttgctatgttgcccaggctggtcttgagctccttggcttactggatcctcctgcctcagcctcctgagtagctaggattataggcctgagccactgcccctggtttacttaattatttttgacagtaattagtttttcccaatttgcctttgaagaaaatttcccccatttatttgtcaatacaaatactgctataattaatattcttgtacctatattttgagcatccatgctagtattccattgttgagatttcctaaagtaagattactaaagttattatactcatttacaattttgatacagccaaatttattttacttccgtcaatagtgtataaggatcctgatatatcccattcttgataatatcataatatcaatcagtttaacatttgccaatttagtttttttttttttttttttttgaggcagagtctcactctgtcgcccaggctggagtgcagtggcatgatctcaactctctgcaacctccacctcccggattaaagcaattcgcgtgcctcaacctcccgagtagctgggattacaggcatgcaccactatgccccgctaatttttgtatttttagtagagacggggtttcaccatgttggccaggctggtcttgaactcctggcctcaagcaatccgcctgcctcggcctcccaaagtactgggattacaggcatgagccactgtgcccggctgccaatttactttttatatgacacttaaaaactggtagactaaactgggtgtggtggtgtgtacctctaaccccagatccttgggaggctgtggtggaaggatcacttgagcccaggagtttgagaccaacctgggcaacatggcaagaccccctactcaaaaaacagaacaaaataacaaacacaaaactgctagactagggaggagtcaaattctgtttgatgctgacactggtgtaatcttcagagattaatgaccagatctccaacagccccatctacccccactttggtaaacagtgaggttttaaaatctaagaatttggttaaacctttccagtatcaggaaaattgtatcctgcttttcctctcttcctatttcccgacaaggtgacattgagtagaaagggctgagttgtgtgcttatcctggtcttaatttcacctcttttttctattctcaacgtgcttcttccctagtgatttcacggagtgactctggtataaggaaaatcatcctttggaaacttacttgttttcttcacattgcccttgaaatgatcacaggggcactgcttctttggcagcccagacactgtcatgaattttcttctcggggctctcaggaaccaatctggaacaacagcattgctgcttagatgggagagttaatacatttgataggagggagtaggacagagctttaatcgccatcttctgtgccttgcatttccactgcaatggggtgggaaaaggggtcaacagagaacagtgtccatccagctatttgaatgccagtatttctgagttgtttttcctgacaactttgggcaaggtttgggcaagggtttgggcaagggtttggtggcaggtttggagggtgcatcagaatatcattactccaaagaatgaggagtaaggcttgggtgtctgcttttcagtggctactttcccttggggaagccattttgcctctctgctttcagtcttgcctgtgagtaaaataaggctgagaataggattcaggaagcttttggaaggccaggaaaaaataaaaaggcttttggacggtagctctgggttcttcaggaaaaggataaggggcagggcgcagcctgacatttggctggctttcccctagaccttggagaagtccagttcttgcctgagagtcaggaagaaagtgggcacaggtgctgcatgtggcaggctgtggagaggggaatgggtgaggtcagctgagataacatctgcattggtctcagaggggcccaagggagagagctggggtcatggtgatgccatcgctgttgttgttgctgaattactgacctttgcactcacattcttggccgccttcctggagccatctcctagaagcctggcctcggtccctgtggcctctggcgacccctgtcggaaggaaacaggtcacatccagacactggaaagggcacagaaatgatcctcccagcattgttctacctaggtcagcacagttccatttttccatttttacttcaagaatctaggttacttcaagagatgaatattttatttttatttatatttttgagatggggtcttgctgtgttgcctaggctggtcttgaactcttgggctccagtggtcctcctgccttggcctcccaaagtgctaggattataggcgtgagccactgtgcccagctgaggggtattttaatcgataagggattgaggtttaaaatctggcctatacataagcatattcaaaaatttaatgattaaaaaaatctggcctagagaaaagcttagctgaaggtaggtggagaaagaatggcttctagatggaagagatgataaaaggcaggggtttgtcgaaacctcctgccctctcctcatacctcacattaaaatcctcatgacttaaaagagtgagagcgaggaggagattattccttaaatcaagattttcccttgacctccaagttgctgggttttttgtttgtttgtttgttttttgagacagagtctcactctgtcatccaggctggagtgtagtggtgcaatcacggctcactgcagccttgacctcctgggtttggttggtcctcccatctcagcctcctgggtagctgaggcttcaggcatgcaccaccactcctggctagttttttgtattttttgtaaagatagggttttgccaagttgcccaggttggtctggagctcatgggcgtaagcgatccgcctgtcttggcctcccaaagtgctgtgattataggcatgagccaccacacccaccccaagtagctgtatttgaatccagagtcccagttcaactattaaacgatggtatttacctttgttcctctggaacaaatacattcttcttttggcctttatccgagcctgttttattttccgattctatcttatctccattttttgatacttaaaatattcctatgacaggctgggcacggtggctcatgcctggaatcccagcactttgggaggctgaggcaggcggatcatgaggtcaggaggtcaagaccatcctggctaacatggtgaaaccccgtctctactaaaaatacaaaaaattaggcgggcgtggtggcgggcgcctgtagtcccagctactcgggaggctgaggcaggagaatctcttgaccccaggaggcggaagttgcagtgagctgagatcgtaccattgtactccatcctgggcgacagagcgagacacggtctcaaaaaaaaaaaaaaaattcctaagacaatcaagaatgatggtttatagacttgagattctcaagtaagagcttggctcagatgacacttcctttatggtagtttctgatatttcctgtcaacatgaattataccttcatatggttcccattgttgttgaatgcagttctgttattgcactgtaatgttgttgtttgaaatcttttatggactgaattgtgtctcccgaaattcacatgttgaatccataacccccagtacctcagaatgactgtatatggagataggacctttaaagaggtgattaaaatcaggctgttatggtgggccctacaccagtctgcctggtgtccttataagaaaaggagatttgggctgggcgcggtggctcatgcctataatctcagcaatttgggaggccgaggtgggtgaatcacaggtcaggagtttgagaccagcctggccaacatagtgaaaccctgtctttactaaaaatacaaaaatgagcagggcatggtggcgcgtgcctgtagtcccagctacttggaaggctgaggcaggagaattgcttgaacccgggaggcaaaggttgcagtgagctgagatcataccattgcactccagcatgggcaacaaagcaagactttgtctaaaaaaaaaaaaaaaaagtaggggggatcctagagagctctttcattctctttccacctcttgaagataagaggagaagtccactgtctgcaacctggaagaggacccttgccagaacccagctgtgctggcaccctgatttcatatatccagcctgcagaactgtgaggaataaatttctcttgtttatgccacccagtctgtggtattgtgttatggcattcctagcaaactaaaataaaatatttctccttcactagactctgaaccattggttcagtagtcattcaggtacgtggttcctaacacatggtaggcatttggcaaatgtttgttcaacacgtggatggataagttgtttggagaggacccttagagatcatatggttcaattcaggcctcctacttcccagacttctgccacacagatggagggggttgcgtcatttccccaagggctgcttttccaatgttctcatgtgctgttttgagtgttatcaaagtaatttaagcaggcataggtcctgccatttaaacttttctaacatttttactcttgcctgacctctactcctagttccagagaaaaaccacagaatattagaccttgaaggaaatcccagagattatttaattgaattccttaattctgaagtttttttttttttcagtctaaatgtaatttaactgttggagaaaattttgaaagtacaaacagagaaattattattcttaccaactgttggtattttggcatatttgttacctacatatgctttttattaatatagtgataaccatagcatgtaaacacattctctttttccattcataggcatgttgctgtgtcatcttcataacacatttttaatgaatgcataatactctcaataattatgtgttccaaattatttaactgctttcccattgctgaatatttagaaagttttattttttagatgttggtaaatttctttgttcttgtaactgttttccaaattttagattattttcttgagagagagttcccaaagtggaattactgggtcaaaagttaagaattgctttcagaagagctatactaatgtttaaattttttttcatttaattatttatttattttttttgagacggagtctcactctgtcgcccaggctggagtgcagtgttgtgatctcggctcactgcaacctctgcctctcgggttcaagcaattctccttcctcagcctcccaagtagctgggattacaggcacccaccaccatgcctggctaatttttgtatttttagtagaggcaggttttaccatgttggtcaggctggtcttgaactcttaacctcaagtgatccgctcccctcggcctcccaaagcgttgggattataggcatgagatgctatgcctggccactttatactttttctctaaacaaatttattttgcaaaacatcctcatcctatgcaatattatctgtgaaattacaggtttgatgtatgcttagttttttcctaacatgcattggaataaacacataaatattaaagtaaaaagaagcttatttactttccacctaaaatcagttttgggaaccactgatacagtggcataagcatgcactttatatccacataggcctggggtcagctactggctctgtcacttaactgtcgacttggacaagtcacttggcttctatgatccttgattccctgatttgtgaaaggagggtggtaaaatcctccttgcagagttgttgggaataagtgagctgctgtgggagcccagtgtccaggcgggtgttgagtacatgatggttatcattgtgtttattgctgtggaattctggttattttccaaagtgagtgtctatgctggaatattgggcttgtggctttctgctgatgtggatgtgtaaagaagttacttccacttgttaggatttgtggtgcatctgtcattattttcacttcccagatccactacatatttgctttgtgattttggacaaagttgtgtaacttttctgtgcctcattttcctaatttgtaagatgtggttaataatattcctcccttatccacaggggatgcattccaagacccccaagatacttcaagtctcagatagtaccaaaccctatatatatattttttctacacatatacacttacgataaagtctaatttatgaattaggcacagtaagagattaacaataagatagaacaattttaaaaatatactgtaataggccaggtgggggctcacacctgtaatcccagcactttgggaggccgaggcaggcggatcacgaggtcaggagattgagaccatcctggctaacacggtgaaaccccatctctactaaaaatacaaaaaattagccaggtgtggtggcgcacgcctttagtcccagctactcgggaggctgaggcaggagaatggtgtgaacccaggaggcagagcttgcagtgagccgagattgcaccactgcactccagcctgggcgacaagagactctgtctcaaaaaaaaaaaaaaaaaaaaaaaaaaaatatatatatatatatatatatataaaatacacacacacacacacacacacacacatatatactgtaatgaaaatgacgtgaatgtggtctctctctctctttgtctctttctcaagataacaatatttttggaccactgttggcgggtaactgaaactgcgattaagtggggactactgtacatgagtgtgcgtgtgtgttatttcccagctctgaccactagagggcctagaagcaccagcacctactagcaatggacctatcagtcagtgcccatagtctgtaaatatcattctcccatgaaaggaactagggcttccaggaaaaatagctgatccagggctggggcagaaaaacacaagaggagcccaaagcttcttgtggtgtcagaaagtaaggagctgctcaaaaaatggtggagatgtgtctaaaggtcacagaagccaactagaaggagctcccaatggccaattttgggacaatatgagcaacataataaataatgatagtagtggattccaacccataaatactcatgagtccatgctgatataaataaataactgaacaaataaataaataaggaagaggctaggcatggtggctcacgcctgtaatcccagcactttgggaggccaaagtggggggatcacttgaggccaggaattagagaccagcctggctaacatgacaaaaccccgtctctactaaaaatacaaaaattagctgggtgtggtggtgtctgcctgtagtcccagctactcaggaggctgaggtgggaggatcgcttgagcccagaaggtggaggcggcagtgagccaagatcacaccactgcactccagcctaggcaacagagcaagactctatctcaaaaaaaaaaaaaaaaaaaaagaaaaagaaaaaggaataactctttcttatggcagaattccgattaaataaatgtagaaggaacaatggaagtagaaaatcactatttggccaacaccacagtaataattctttataggaaacaatcatccatagattctaaaagttaatattaaaagtatgatgatgccataactggtgaataacaagaaaaaaaaaagtatgatgagaagaaacaggctatttacatatttccaaagtgtctctccacaagatacttattaattacaataagatgaatagtaactttacagtagagaaacctggcagacaccacctgaaccaagtgcttaaagtgaacctcatcagtaatgagagatatcgacatcctggggctcttgctgggatgtccagagaaggatacatcacttctgaagtattcttgcccaaaatgtgtagccggaaatatcagacaaacccatattcagggggcattctacaaaacaactggctagaactcttcaaaagtgtcaaggtcctgaaagagagggaaagactgagaaactatcccaggttggaggagacctaggagatctgacattttattcagtgggatcccagattggagtctggagcagaaaaaggacatgagtgggatgattagcaagatttgaacatttgtagattagttaatattatggtatcagtgctaatctcctggttttgataattgtattatggttacataagatattgtttgaaaacaattggatgaaggctgtactggaactctatttttacaatatttttcaaagtctgaaaaatgaaaagtaagaaaaagtaagaaatgcattagatttgtgaggacaaatgagatagtaagtgtgaagtgattagaacaatgcttgtgatataggagttcttaatgtgtctgatattataagtaattttataattaaataatattataattaatgaataatctgttattttaagtaatttatttcctaatgacctcatatattctcacttatttctatttcccttaaccctgtgaaaagcatattgagcatgtatgtgattaagagataaaataagattagactttattctgagatttattttggggatggaggagctattatttcctttagccactaagtagctcagactcaggcctgcactgcaaaactttgcttggctgggaaacaagatttgagcccggccgccacccactcgacgtggtttgtgatggcgccccctggtggcgcagggagctttccccagttcctcaccctcgtgctttaggagcgacttagaaactactcagtccatttattaaaccctttctaggacacgctgcggatcatttaatcttcacaagtgtgtgtgacaagtggtattttcttcattttaagatgataaaactgaaactcaaaaaagtgaggcgacttgtctagggttgcaaagtgtgtggcagagccaggatctaggtccccctgacttccaagctgagtgtaaaggtctaggtgagtctaaaagtgtggccatgcagagaagtattggtgtagagcagtggttgttgaccaagggtggttccccctccggggtcatttggcgatgtctagagatatttttggctgccataacaggggtttggatgagggagaggggaggctgctattggcatgtaggggagagaggccacgcggatgctgctgaacatctcacaatacacagaacagcccccaccgcaaggaactgttcagcccaaatgtcagtagagctgctatgaagccctggtttgatttagcaacctgaggatgcattcttgcagttagctaatgtttgctgagtactgagctggatagcgtgagggatatggaaacagtgcaccagtctgtgtcaccaagtagtttgcagcctagaaggacagggggtgggggcaggaaaggcacatgaaggccctcaatataaggcagcagatgataagtgcaagaagagagtgtccagcagggctaagccagcgctcaggagggagaccacatgtctggctgtgggaggaactgaaggaagctgtgggaaggtggttttgagctgggtgtgtgagcaaagttgaactggtggaaaaacacaatacctgttcagggaagggcaaacaggttagtttggttggagaaatagtatttttagtgagtagagggaggtacactagaaaggcaggttggggctacagctttgaatccaggcagaggactctagcctgggtgtctgtcatagtgatggaaaagtcttccctttcagaacagtggtctaggccctagggctatggggcttaacagcttccagagcactctctctacaaaggaggggatgttggaaattggggtggagaagggagaatgcctcctgattttaggaccaagttgatgctgagtatgtaacatagccatttcacctcaaagtggcctttggggagatggtgctcacaagcggaaatatacatggggatcaggtcttttctgcgtggttgctctgtgcagggctgggccactttatagtgaaagctggagcagatttggaacccctaagctaaagtcggcttcccaaaatgtgagctgttacagcagggcttgctatggataaagcttcaaatatggacactacctggtgacaggctttttctagtttattacgttaccagtaaatagcattaagacatgttggtggcattccagtgcactgtaaagaatagaagcaaggacttcctgatcttctataaaggtaccattgccttcaacactctcccaccatcatcattaagtttagccatgagaattatgttactcttttggaaaagtgttgggggagaaggcatgggagcaaatctttgttgagctagtatatacatacatacgtacgtgtgtgtgagggggatcagctacaattgcagatatcttcttttcttttctttccttttttttttttttttttttttgagatggagtctcactctgtcacccaggctggagtacagtggtgccgtctcggctcactgcagcctccacctcctgggttccagcaattctctggcctcagcctcctgagtagctgggactacaggtgcgtgccaccaggtctggctaattttttgtatttttagtagagatggagtttcaccgtgttagccaggatggtctcgatctcctgaccttgtaatccgccctgccttggcctcccaaagtgctgggattacaggagtgagccaccgcgcccggccagttgcagatattttcacatacaatatctcgtttaactctctcaacattgtttgggtgtaagtacagtttgctgtttttttgtaaaggaggaaactggcattgagaaaggctcacttgccccatcccccatagctaagagaagctgcattttgatgtgtctgtggcctgttttgccacatttctccccccgttttccccttcatagacagtcttgtttacctggattcaggctgctagagaccatggacatcagcattagtggcagcaacaggaggagggaagagattagaactttcatcgcaactgtcggtgcagctgtaagttgcttgaagaatataatggaaggttccctgctggaggctcctgatccctggggatgactcaggtcaggatactcagcctggtggtctatgctttagtcccaggccagcgttcccatttgagggcgagaacaggtgaggtgacgctgtcttgctgttacgtaacagattagaccatgtgctttatgggaatctgggaggtgaaactggtcaaacaaaagaaattcagcattcttaagaacataagaaggtgactgataacttggcagctgtgccagttctctcctgtactctttcccgcctcctcacaccccaatgcctcatgatttcttcctcaaatctttttttcttgcttggatttccttatacctttcaatgaccctctctatctgaatatttggcaggaaagtggatactaagtgttggtagaagagactttgacaaggtctgtttcccctctgtgctcctgctcccatccttggcaaaatatcggcaatagtagtgttgttgcctgggaagttgccctgtcctctctctgttcacaattccctccaattctgcagccacataagatggcagcagagcaggatccgggacaagaggcagctcccctgccgagaacaccgcccctggagcagtgggtgacaccaggcctccttgtgtgtccatcgggaaggtggccatggcttagttgttctggtctaaaggggagggaactgggttgggggaagagacccccagagctttaggtctcagagggtttgagaaacaggagccacaggagggaaggagccctgaagtgtgtttgcccagctgctggggcgcctggctccagcccttgtttggaaatggccccgggcaaaagaagaaaggtaataatacttgaagtaaacattaggggcatagaatatcagcactcactaaacttgacatttatttgagactttaggaaatgtgctcaaagggagaggagaggctgggcttgaatgctgggtgatattcatgggggctgaagggaaggctaacaagggagccctttttttggaagcctccaggcaggagtgagagcagggggtgtgactttatttccctgagagaaggaaagaggaaaggcatgagtcaaagccctttggttttgtttgaccattcttttttctccacgttttcaaattatctcggcctgttgacttgtcacagagttgattgtggactttgctactgcagtgtttataaagcactgcaggggccagggactgctatgactgagcctgtgtccaagttgaaggctcagggtgggcctaagcttgttctgatgcaaatcactgatgtggcttctttctggaaaattctaaaaccagggagatgacatccatttcataaagcctagagatatgggtgcagtcatctctcaaagtggcaggagtgcagggggactgagagggacttggttgggtggaacttgagctggagttgggggaggatttgggttggtggagggcagagaggagggccgtgcagagcaggggcgtgttgtaggagaggtgcctcctggagctcattggatggggattttagaggacaggagctgttcgtgttcatttttgtattgcttgaacttacacagggtctggcactttgggagtattctataaatgactgttgaatggaatgattgttttgtagcccattaactgggcctgatgtattagaaagtgtgcgaaaatgtagcccattagcagaaagaaaatcttactgaaaaaccatcccatgtacaaatggagcctggtgcggccactttacttatgctgctgagttctgcatcagtccacacccaggccaccgcaggggccgggagctcctcctcagacctacctcccgtgcctcagtctctttacccctctgttcttccaggtcctgctccctctggtttcccctccatgcacttggggtgggtgttgcatcctgtgtcccattggagggggcttccggtctgttaggtctattaatataaaacacccccaagacaaatggacttttttcttgttaacatcacaacttcttatgatgcatctcaagaacattatttgtgtcaagagtctctctgatgtacagaggccctccattcctcaggaggaggtaaggggaatttgggagaaaacaccgccctgcctgggttacttatttccctattctacagtgtacttggtagacattcaaaaatatttgttgactttgtccatgatccacatggctctcatatagtcatttattcacacatacattcagtgagactttgagcgcctagtgtgtgcctggtatttactagatggtggatgctgagatcaggtgtgctgctgtctctgaggagctctcactatacagtggcacctagggtgaccgaatccacctgccccactttacagacatggaaattaaagtgcagggaagttataggattagttcaacaacacagtcagtagcctcaaagttacaggagtaaatcaagttttctgacttgctggattttctattagtgtgcagctacctggctgctgcaggtgtagacgtggtgagctccgataggagagaggacgttcagagtgaaatgggagccctgagcaccctggattaaccgggaggacataccgggtccagctgtgaccgcacaaaggaccatcagggatatttgtattctctttttcactttgagcttgaaatgaagaaaactgaccccaggaaaccaagagtggaagatttttcacaggggattagtgagatgcgtcaaaaagcctgtgttggatgggtgcctgtaatcccagcactttgggaagctgaggtgggaggatggcttgggtccaggagtttgagaccagtgtgggcaacatggtgagaccctgtctctataaaaagcttttttgtttcttgttttaaaaagaaaacccttttctgatgtctgtcacggtgtttctcactgaatggtaatggtctgactttgagtgggtttcatccatagcctggagctctgtgaggcagggaccaggtgtgattcacctttgtctctccagtgacagtacacagcaggatccgataaatatttcttacaaaataaaactgaataaaaagtagacatctgcacaggtgtgggatgactaagcagcagcaggagcaggaaaaatcagtccccccagatcagctgatacagcgttcagcttctagataggggtgaggtgccaggacggggatggggttcctgtggctctgctgctctggggaacacccctaggattcagagtgtaggctgtggttgctgcacttcacttgcccgtgggaaagtgagcagtgggtgtggggcttcaggtgaccctacgtgggaaacggccgagggaagatggggtaggtggcacatagaggttgtttttttatttttttatttttatttttgagacgaagttttgttcttattgcccaggctggagtgcaatggtacaatcttggctcaccgcaacctctgcttcccaggttcaagcaattctccttgcctcagcctcccaagtagctatgattacaggcatgcgccaccatgcctggctatttttttttgtatttttagtagagacaggatttctccatgttggtcaggctgatctcgatctcctgacctcaggtgatccacccaccttggcctcccaaagtgctgggattacaggcatgagccactgtgcccggccaaggatgtttaccaatatttgaaggtcggttgtataaaaaagtgttagacttggctgggtgcattggctcatgcctgtaatctcaacactttgggaggctgaggcaggcagatcacctgaggtcgggagtttgagaccaacctggccaacatggcaaaaccctgtctctactaaaaatacaaaaattagccgggcgcagtggcgggcacctgtaatcgcagctattcaggaggctgaggcaggaaaattgcttgaacccaggagggggaggttgcagtgagccaagattgtgccactgcactccatcctgggtgacagagccagactccatctcaaaaaaaaaaaaaaaaaaaaggaaaagaaaaaatgttagtgtcacatgcatccatgtgaagagaccaccaaacaggctttgtgtgagcaataaagcttttaatcacctggtgcaggcaggctgagtccaaaaagagagtcagtgaagggagttagggatggggcagttttataggactagggtaagcagtggaaagttacagttaaagggggtttttctcttgcgggcatggtggggagatcataagactcattgtccagaagaagaatgtcacgaggttgatcagtagatcaattgggacagggcaggatcaagtcatgacagaatgtcataaggttggtcaatcggttaagataggagttggctgtttcccttcttttgtacttgtcggttgcctcaggccatctggatgtatacatgcaggcttgggttcagaggcctgacattcctgtcttcttatattaataagaaaaataaaacaaaatagtgttgaagtgttggggtggcgaaaaaattgtttttggggtggtatggagagataatgggccatgtttctcagggctgcttcgagcaggattaagggctgtgtggaccttaaagaaaattttataataggttacatggaataggagtttaggctgtggggagatcttggggcagaggatggtactatggggttgttaaaagtagcatttgtcatatagaatgattagtgatggtctgaatgtggttttgtgtgaattgagaaaccaaacggaagacacaaggcccgaataagaggagaaaaagaggtaccagaggactaagaattgggaggacccaggatgtccaattagagagtgcccaagggggttcagcataattacttgcttgttggcgagtttttgggctatatccttgagtttttttttatattgtcatatactaggccagattgatttaggtaaaagcaacactcttcatttaaaaatatagagagtcctcctttttcagcagtgagtaagtcaaggcctcggcggttttagaggacaactgcagctaaagagtcaaccttggcctgaaggactcatagagtttgtgatatgtctgtgatgctagcagagaagtcattagagaggctctggaaggtcgtgacagaggctgaaatgcctgctattccagttctgagcgcaatagcggaggcagaaagtcctaaaccgacaagtaagggaattagtggaataacctttttttttgtcatgtcggtgtcatgagaggaacaggaagcttttcagtcccattcgcaaattgaattttgggagtaaggtaaactagtgtgcatgtgcctgtccaattagcaggtagacacatgtaggcagaggatccacagaggaagaagagaccttgtgcaaggcaaaactggaaatgcaaagtaaaaagatgagaaggaatactaaaagaggtgtcttgcactcagactcctagggatccagctagggcggcagccatcagaggttgtaatggggactgatggggtaactgcatagagggggaggttcgattttcatggtgtatgagaaaacgttgagtgtctacgagcaacctttcactgttatttacagggctgggtataagcaaacaaaaagagggcctgggaggagagtctgacgagcaaggggaaggtagtcaaggatggagtgaaatacagggtaagtgtcttcctaggaaataataactgctaatgtttttaagtttgccagtattgatagagggcttttctgtaatatggagctgggaggccccaattgtttcagtgatatgtgtagttgggctttggagatgaagagtgaaggaacacggagaaggtgaaaggttacctaggggaattccagtgggtctttgccaagagatacataaaggagtggccacaggaatagtagtttgtgttgtgaggggtccaaatatggggggagtagaattaatataaggagaaagattttttaagtaagtgcggagaagggcggcagcttgctgatgtgaaatgtctggggaggtcttgctggacctgtctagaaagtaaagaatttctttaggagggttaaggtgagggctgttaaaggaagttcggaggtgtagggagacaggagatgttgcttagtctgtatgtaaggcggggacagctgtgtaggcacaggaagaaagggaaatgcaaagccagcaattgttctctaaggagggatcagagacggctaggagagagtgaatgagactgatagtgtggtggagatagctggggagaggtagagggtggcataagaatgggaatgagaataagagtgagtataaaagtaaagaatagaacttcatcagggtggaagtattggagggtgccctgccagcaaagatcatctatccactctaagagggagttaagagtggcagtttggggatagcaccaggagatatccactgtgatggtttggaggaacagtgtaaactggcagtgtaaacaagagcagggcatttatgagtagttgagaacggtgaataagagtatgactagacagaagatagtagggatgacaagttttttggggtgcagtccaagtagtgggggtgactgcataaagccctgttgcaaaaagtagggtaaggatgaacagacctagtagaatgaagggacgtattaggctcatgagggttattactgttcttcagaaatacaagtgagtttaagggaagtaggggagagtacttgcgacttccaggaggaagaggagagattaggctggctgtttgatggacacagctttattctggaatggtgaacccaatggggaggatcctgcaggcggacagcagttggggtgctagagatgactaagtagggtccagtccattgaggttgtagagtttgaggggtcagattcttaacaagaacgggttgtccagctagggtgtcttcatatggctgggaatctggagtaggcaagagaagattagcagcctggggaatttcctgtctagcctgctggaggcctggaagatagttgcctagagggccggtgtctgggacaaggttggggccgagcaagaaagtgtgtccatgtaaaagttcaaatggactgtaccctgtagcatctcgaggacaggctctaattctgagaagggcaagaggtaaaagtactgtccagtcctttttaagttggagactgagcttggtgaggtatgtctttaaaagaccattagtccgttctacctttcctgaagattgagggcggtaaggggtatgaagtttgacttatttcagcctacagagagtaggatgagaattggtgagtgtgtatcagacacattttggctcaggatggaaaagaactgtcacagtaaagtaagtttccttgggaaattacaagtttactggtggagttcaggcctgagctgggtgtctgaaaatacctgttagagtgatttctaaggttacaagggcagagcttggcttgaaactaggtttcccactgataccacatattaggtattatacaaactgtcttttgcaatgagacacggccctatgatgcaggctgagctctctgacagttacttcctgtctttgtgggcgattgtgattttatctcctttgtgacctggactttacctcctaccctttgctcttgccagccctcccacttcctttactggtgacaaggtttaagtgcatttactgatgatggtcacaaggtggcagcactgcctcactggtgtttcctaagacctctgcttggacgtgggccagtctaaggtgctgttaggattaagggcatgaatgaggctaaaggtaaactttattttcctttttttatcctgtgaagtaacagaatttgaggtgagtgtgaagtaattgcatttgagaactggaagtgccatgtgtggtggctcatgcctgtaatcccaacactttgggaggctgaagcaggaggatggtttgagcccaggagttccagaccagcctgggcaacatggtgagacctcatctctacaaaaaataaaaaaattagccgggcacggtgacacatgcctgtggtcccagctacttgagagcctgaggcaggaggattcccttgaacccaggaggtccaggctgcattaagctatgatcctgtcactgcgttccatccagcctgggtgacagaatgagactctgtctcaaaaaactccaaaaatgaatacaaaattaaaaagtctggtagaaatgcttcacaaactttaatgtgctcacagatcacccaaagatcttgtttaaatgcagattctgattcttctggtggggcctgagagtctgcatttcttttttttatgattggcattttcacaagattctgcatttctaaggagcatttggacgatgtcattgctgctggttggtggagcacactttgagtagcaaggcttgagtatcatttagagattaattctcactgcatctgatttatggatggggagagactgaggtgtggagatggaatagagcttgccctccatagccatgccctcaccgcatgactttttgcgtttaaacccagggcttcagcctctttgtccagtccttgcctcatgcatcacatggccccttcactgttgttggtggcatctctttagcttaggaactcagaaccccatttttatcacccactctgggcttggctcaacatgtcactttgactggttttccccttactcaaaaccttcactgactcttctgtaattcacaagatcaagttcgaatgtctgtgtccagtgttcatgcctctataacatatgtatgatccccctttagcaagcttacctaacttccctggtttttgtttttgtttttgtttttgagacagagtcttgctctgttgcccaggctggagtgcagtggcaccatctcggctcactgcaagctccgcctctcggattcacgccattctcctgcctcagcctccctagtagctgggactacaggtgcctgccaccatgcctggctaattttttgtatttttagtagagacggggtttcaccgtgttagcgagggtggtgatggtctcgatctcctgatctcatgatctgtctgcctcagcctcaaaagtgctgggattacaggcgtgagcccaccgcgcctggccacttccctgtttttaaaccatctctttctgctctagctctccctgttccttcctgttccctacacatactctgttctggtctctctcagtggtagtggtggtggtatgggctctggtgttagactcactgagtttctaatccaacatccaccaacaaccttggcaagttacttcacctttttgaggatcagcatcctcctgtgaaataaccccacatggtggttgagaggagtaaataaaaaatcatctgtacctcataaatatatatacctactatgtacccccaaatgtaaaaattaaaaaaaaagtaaaacgacatctgcaaacccgctctcattcctgagaccctcttcaaagctagcatctacagcagtgcctgccacctggtttccttggcgtgtgtttctccttgtctctgctttcctaaggttgaacccttcaggacctcacctgaatcccgtctgttccatgaaacctttcccagccattcctgacccagttgatccctcgcttctataaattattttacctatgtatgggcatttaattacatgccagccctctcagtgagaccccatagggaggctggaagggtattggatgtgtgcgaattgaaggttaattgaatgaatacttttcttactacccactgagtgttagagctgccgtctctttttttcagctagtcccagcggcagttcctcctgcaccagctgcaccagaccctggcaggcatgtgaataccttagggattgctcttgtcagggtccttcctgcctctgggttttggttaaattggtgtttccttttgcacgatatcagtggtccctctaagggagagattgatgatatctctttatggaaatgccaagataataactgaggaagttgaactcaatatcttattgcttaaacagcctggttacaggagatgtgtacacactttcttgtttcgttaaaattacaacagtctttactctcttacttcagaagagactggggacaaaagaccaagtgggagtgtgggcaacatagggagaccccatctctacaaaaaaaaaattagctgggtgtggtggtgtgtgcctgtagtcccagctactttggaggttgaggtgtgaggatcgtttgaacccaggagctcaaagctgcagtgaactatgatcacgctgttgcactctggcctgggtgatagaccaagaaaaaaaaaaaaaaacaagtggggaggacagggtggtttaggggagttaatgtacctctaacctggattctctgaattgttctttcaatcatgtctggaagtgtacatctttgtatgtgtggtcatatatttatatcacatcactcataattccctgcctgtcagtggcaattaggagatcatgtcagtcaggcttaggatattaaaattatgtagtatgtgctttcactggagcaaaggtttctctgaagtctggagagaaaatggaccagtagggctggaccctttacttggggtcctgccttctctttttattggacagcagcctactcagccatcactttcccaatcaggggcttttttttttttttttttgagatggagtctcgctctgtcgcccaggctggagtgcaatggcacgatctcggctcactgcaagctccacctcccgggttcatgccattcttctgcctcagcctcctgagtagttgggactacaggcgcccgccaccatgcctggctaattttttgtatttttagtagagacggggtttcacggtgttagccaggatggtcttgatctcctgagctcatgatccacccacctcagcctcccaaagtgctgggattacaggcatgaaccaccgcgcccggccaatcaggggctttttaaccttcccattttcctataaaggatccatgccaatgttcagatatatttattgtgcctggaactggatgttcttttaaaaagtgaatcccagggatggcttcctagcagatttccaggattctaatcttcactgtctaaactgtgggtttccaaccttgaatactgattagagtcgcttgtagggcatttaaaacctaccaatgcttgtgccttcccccaagagagtgtgatttgattgatgcatgatgtggcccacgcactggttgtttatgaatgcttccaaggaaaatggtcattttacagtgggggaactgtagcccagtgctcaaagttaacatctccagtaatcagagatactgacatcttagggcatcctaatatgatggatggagaaggcgcagcatcacctctgtagtattcttgcccaatgtatataactttagtttcatcatgagaaacaactaggaaagcccaaaccgagggtcattatacaaaataactcaccaatactcttcgaaaatgttaaggtcatgaaggcaagagaaattctgaggaactgtcccagattaaaggaaactgggaggacagagcaatgagatgcaatgtctgatcctagattggatcctggtccagaaaaagaacattagtgggaagataaaggggatttgaataaggtctacagattcattcattgtacagtatcagtgatcatttattgattttgatgattatactgtggttatctaaaatgttaatatttggggaggctgagtgaaaagtatatgaagaccctgactatttgtagaagttttttgaaagtctgaaattatttcagatgaaactaaagaaaggaaaagaaagcttccaggtaattctactgagttgccaaagctgaaaaccacttctctaagttatcttgcttaataatactgtcaagagtaatcttcctggaaataccatattgttatgtttgtgaccttttcaaagctttccagtgattgctgtcatctaggatgaagttcctgctccttaggctaccatttaaagcccccatagcatggcctcaatctactccgttgatctacgtggaaggacttaacctacattttactttctcatgcctgagcttattctaattcttttactccttcctatataatacccttgccttcctgttcagcctcctgagctgttctttgtgctatggcccatttcagaccctgtctcttcattgaagcctgtatagttattcctgttagaagcaatcatccttcctttctttgaattctggtaggtaccgtgatgtggagtgaaccacgagctttagattcagaaatatgtgagtttgaatcctttgacagttccacctttaaccagttctgagataagggacaagtttatcaacatcttggaatagaggggtaatagagtacctgcatcaaagggtcattgtgaccattagatcagatgcaaacataaaggtcctcagcacagcatatagcagattctttcctcagcactttaatagctcagtggttcccagaaagtttgtgggtggtgtgaaggctcttatcaaaatttcctaaagagccttttaaaaatatttgcacctggtcatcactaagatgacagatgctctttaatggaactgaatgcttgggactttaagaaatgcaactgagatttttttttttcccccttggaacacaactgagtaaataagtgacctaagggcagaggaatgtaacccaaaagagggagaaggaggaactgggtttttaagtaggaaaaagctgtgatgccttccacacccactctgttgctgtcagtgagacagcagtgaggaagtaccactccctagtacaactccttaaaccatgagtcctgaacagcccttcactaatccattccctgtccagatgatgtgtacctggatgagtcagatccccatgagtcaatcattcttctccgtcttcagctcctccatcctcaccactcagtgctatgtgctatggtctggccccacttcccaggccattagtattggcctaagaaagcaagactgggaggggcaactgagaaggaagtcagaggccactaggcatggaaagaggcaggtggggctgtcattgctcaaaggccacacactctgggtgtgttttatgactgttcctggatttgaaatcttttcccctttgtgatcattccagagactcaccctcctcctgcttccttctcatcacactatctgttcctagtgcatcccttttacggccagagaatggctgtacaaatagttaacaattcagtaaaagttacagctgagcacggtggctcacacctgtaattccatcacttgggaggatgaggagggcggatcacgaggtcaggagttgaagaccagcctgaccaacatggtgaaaccccatctctactaaaaatacaaaaattagctgggtgtggtggcacgcacctgtaagcccagctactcaggaggctgaggcaggagaattgcttgaacctgggaggcggaggttgcagtgagccaagactgtgccactgcactccagcttgggcgacagagcgagactccatctcaaaaaaaaaaaaaaattactttttgggagaactgggaacctggccttcctttttgccaaaagagattgaggtccataaaagccagcttttattccgggctgtgcagttgtgagtgtggtgttagggaacaggtacataagtgaagggtaagacagaaaacaaaatgctggctgtttgtcaaatcctgagagtagaggggacaaaaatcattctgaaaggtggatgtcattcaggacaccttggaaatcttagggtgtcctcgcccagatggggaggaggatgaggttaaattatggagttgagtgacacttggtacattactaaacttctctgcttcagtttttttttttttttttttttttttgagacggagtctcactgtgtcgcccaggctggagtgcagtggcatgatcttggctcactgcgcgctccgcctcccaggttcatgccattctcctgcctcagcctccggagtagctgggactacaggcgcccgccaccactcccggctaatttttttttgtatttttagtagagatggggtttcaccgtgttggccagcatggttttgatctccttacctcgtgatccgcctgcctcggcctcccaaagtgctgggattacaggcgtgagccaccatgcctggcccctgcctctgtttttttaatctgtaaaaatggggatggtgacactcaggattctttgagaggactggagctacatggaaaccccttgggatagtgcctggcggatagtgagtgctgcatcagtgtgagctattataattatgggaatagacaaaggtgtcacccggggcatccagagtgaggaggtattttccagtcagagtcctgggaggccagctggagatgaagctggtgaagggggaggcttaacctccaggagtggaaggattgggaaggagtaactcatgcataacattctgtgaaaatacctttacccaacagcaggaatacgcacagtgggtgtggcttctgtcacaattattgtccctggggtctaggaatgtgaaacccaagcctagaaacaggcttcaggggtgccttgcaaattagcattcatcttgccaaaggaaaatgttcatcttgttaaaagaaagcatttacgtgctaaaagaatcccttcttgtggcccaggtcattatttttgtcttggtactatccttttttttttttttttttttttttttttgagaaggagtcttgctcttttgcccaggctggagtgcagtggtggatctcagctcactgcaagttccacctcccgggttgacaccattctcctgcctcagcctcccaagtagctgggactacaggcgcccgccaccatgcctggctaattttttttgtacttttagtagagacggggtttcactgtgttagccaggatggtctcgatctcctgacctcgtgatctgcccacctcggcctcccaaagtgctgggattacaggcatgagccaccgcgcccggcctgtactatccttatttacaagatgtaaagagaaagactgggctgggctcagtggatcacgcctgtaatcccagcagtttgggaggccaagcgggggcggattgcctgaggtcaggagttcgagaccagcctggccaatatggcgaaactccatctctactaaaaaatacaaaaattagctgggtgtggtggtgtgtgcctgtaattccagctactcaggaggctgaggcaggaaaatcacttgaacccaggaggcggaggttgcagtgagccgagatcgtgccattgcactgcagcctgggtgacaagaacgaaactctgtctcaaaaaagagactgaagaagagtgaaataaggatatatatgcattagcagggcagaattgggactggtatgtgtacgttaagaggaagcatgtaaaaattgtatgtgaacataaaaaggacttcttgttttaaacagacctctccatataaataatgtggactgtcttgagtagatagcagactccatcacaagaacattccagcagaatcacaagagaatggatagtgtggccgctttctaaatggtagtttagagtgagcaaatcactgaaaagaaaggagaccaagaagatgggtgagggtgagagagatgggatggtgaaaggaaaagactgaaataaatgtttaccgagggctcaccaggtaccaagctgtgtgtctaatgccttacacatgtttttttttttttttttttttttaagatggagtcttgctctgttgcccaggctggagtgcagtgacgtgatcttggctcactgcaacctccacctccctgattcaagggattctcctgcctcagcctcctgagtagctgggattacaggcgtgcaccaccacacccaactaatttttgtgtttttagtagagacggggtttcaccatgttggtcaggctgatctcgaactcctgagctcgtgatccacctgccttggactcccaaagtgctgggattacaggcgtgaaccactgcgcctgaacaatgccttacacatcttaatttactcttttattgtcatcctctgatggagtaagagtcacctttgtgctgcaaatgagaagaagctgagggaggcgaggtgagtggtcagcatcatccagccagttcatagcagagctagtgtgtttcacctcaaagtttgtgctcttgcctatgattcagacagaaaagtgagacacagcaggaaggcaaggcaaatttttgttgtgggtgaagtttataaaaggtacctgtattaggcagaataatggcctcctgaaaatatccacatcctaatccctgggacctgtgcattttactttatttggcagaaagactttgcagataagatgaagttaagaatcttgagatgggggaattatcctggattatctgagtgggcacattataatcagaaggatccttataggtgaaagagggaggcaggagagtcagggtgaaaatgatgtagcatgaggaagactccactggccactgctggctttgaagatggaagggggccataagcaaaggaatataggtggcatcgagaagctgggtcgggcaaagaagaggatccattccttaaacctccagaaggaaacctccagaaggaacaccgccaatgccttgattttagcccagagaaatctattttggacttttgacctccagaactataagaactgggaaaaatgtatgtagtttttacattccaggaggttacagtctgctacatagtgaaaagggactggaaaaaataggccaaaatattaaacaacgattaggtctagattatgggtggaaaatagaatacaagtgatagctattttttctttcatactttatgtcttaattttcaaaggtaagaaattaaaggtaattactgtcaggcctctgagcccaagctaagtcatcatatctccagtgatctgcatgtatacatccagctggcccgaagcaactgaagaaccacaaaagtaaaaagagccagttcctgccttaactgatggcattctaccattgtgatttgtttctgccccactctaactgatcaattgaccttgtgacattctttttcttggacagtgagtctcatgatctctccaccgtgcactttgtgacctccaccactgcccacaagagaaaaccacctttaactgtaattttccactacctacccaaatcctgtaaaactgtccccccaattctccctttgctgactctcttttcagactcagcccacttgcacccaagtgcctgtatagtagactgtcttcacatggacgcgagtaacaattacattgcgatgttataaatagaagtatttcaatgtacctgttaaatcctctggacgatcactgagaaggcatatctttgagtgtaaggatgaatttgccaaggacaggagtgacgttataggcacagttttttaaaggcaggaagagagggccttatccttcaacctaaatggtccatcatttccatggatcaaactcaaaggaatgactagtcatcaaggaatgtgttcagtgacatcttatggggtaaactgagacattccaggagcctggaatcaatgtgaagtagtttcagacttggtggcaggggagaatgtgctcctaaaatctgttgtttagggctcagccttttctgcttttttcttcctattatttcttaacaatgctgaggtgggcagggccccagtcccggaacaggtcacctgtacttaataggaaggtttgtttcctttgttgaaaggggtggatatatagccctgagtttgttttttttttgtttttctttactagcaattagggaaacatagagtggctgctttctctactaacagcctcataatggagccatctaaatctcttactgattcctctaacctccagggagccacacctttacccagtcctcctagatcctgggggaatcagaggaccttgtgtaagcactatgtgaggaaacaagaaaacctaggggtaagaactcttgtaattgcctcttttttttttctttcttttaaaatattttaaacttttattttaggttcagggctccatgtacaggttttttgtttttgttttttgagacagagtctcgctctgtcgcccaggctggagtgtagtggcgcgatctctgctcactgcaacctccatctcctgagttcaagcagttctcctgcctcagcctcctgagtagctgggattacaggcgccagccaccacttccagctaatttttatatttttattagagacggggtttcaccacgttggccaggctggtctggaactcctgacctcaggcaatccgcagcctcccaaaatgctggaattacaggcgtgagttaccgtgcctggcctgcaggtttgttatacaggtaaacttgtgactcaggggtttcgtatacagactattttgtcactcgggtacttagtacccaacagtttttttttttttttttctgatcctctccctcctcccaccctccaccctcaagtaggccccagtgtctgttgttcccctctttctgtccatgtgttctcatttagcttccacttataagtgagaagacacagtatttggttttctgttcctgtattagtttgctaatctattttattaaagtatgtttccctttcacccctcctccctccccaccctaatattttagggctaagccctcatcactggacacaaagaaactggtttcttagatgctgctatgctttggttccacccaccaagacaatgggcctatttttttctataatcaaaggccctgtgtttggcccgtacagttctacgttaaactggtgccaaagctcacgccttcctgttccgttccttccaggtcatctcagaatctgcaggcttgtggggcagggtagggagtcctgagtggtgaccacagaaaggggaaagctgtgggaatccaagacagttgttcttgagagagtcttctaggcctgttggcagaagaagcagaattgtgggccaggacctgggtcctggtgttggtgactgagctctgactttgaatgagtagatttgcctatctaggccttagctgtgcctgctgcaaaatgagatttgagatgaactcaagcccttacagcttgactgctctagccatgcattttcttttctcttcctcattgaaatctatatcattccttcagggcccaaggacccatgctcagaagaaatcaatttggctaatgtccttatgagaggggaccaaccctcaggctttatgtgctctttggccttttatgcaagagtggtgagggtggatatttttgttctggtcttcttttggtgctctttgatagcaggaagggcagagtcctgacagactgtgaaagtcttgaccaccagcttaaggagtctggactcttgtgagtgtggaactaccagaggcttaaagtgggaagtgacctgtgtctcaggacacatactctaggagaagtgtggctgtgcagagtccacatgagagactcagatctgaagtgagaaatcagagggcatgaagaacaggggcataggcgtgagccatttgaggaagagttggaggtctttgtgagtgaccagaggggaggagatgggaaggaggggcctgaagatggctccgagctgtgtctagtttgggattttgggtggaccagatgtcattagccccaagataagggtggggctaggttgattaggggctgaaatgctaaacctagttttgaatgttagataagatgcctatcggccatccaggtggaactactgtgtggggagtgggaagaatacagctggcgctggagccagggagtggtagagggtgaagaggaaagagggagtgagctgggggggtctctgcctctgtagtaacttcacacctgctctcctgcgtcgagctcatggctgtgttctactctttccctctctgttctctgatcagagcaatttttcagggttttggctggatagatattattagcccaggggtcacatatttactaccaataggtcttttggaaaatggggactgtgaatcaatgaatggagaggtgaaaagaggagagtgaaggaaggacttttggagaaagataatagggaagaggaggcaggtgaaacacatgctataaaatgtgttagcattcattataaactataaaaagcacaatgcaaatgtacagttctgctgagaacactgtgaccatgggttggaagggggagaggtgagactaggagggtaaaggggaagaagtagcttagaaggatgaagccaaaagccaggctactagatctagaagtctccttggaaggctctctactgcttaaaaattacttggcctatccaatctctttggtgtaatgagttttttttttttttttttttttttttggagacagagttttgctcttgttgcccaggctggagtgcaatggcacaatcttgactcactgcaacctccacctatggggttcaagtgattcttctgcctcagcctctggaatagacgggattacaggcatgcgccaccacacccggctaattttgtatttttagtagagagggggttttgccatgttggccaggctggtcttgaactcccgacctcaggtgatccgcccgccttggcctcccaaagtgctgggattataggcatgagccactgtgcctggcctgggtgtaatgagtaatgggtcttatatgtttatatgacgatattaaatgctaatagccaacaaatattgtatgcttacaattagtacatctaacacagctagtgtaactaatattgtgtactaatagtacgatgagtggccaacaaatattgtgtgctcagtatataccaggcagtgtgctaaacactttaactagattacctcagttgatcctcacaacagcacatgcggcgggtacttttattggccccattttacagatgaggggagtgaggtatagtcatttgcccagggccttgcagcttgtatgctggagccagaatatgaagccaggccgcctgggggactatatagcatgtggtcttaatcactcagcagttcagggtagttcagtacattctgtacttttctgtttttttgtttttgttttttttgagatggagtcttgctctgtcacccaggctggagtgcagtggtgcaatctcggctcactgcagcctctgcctcccaggttcaagtgattctcctgcctcagcctcccgagtagctgggactacaggcacgcaccaccacgcccggctaatttttgtatttttagtagagacagggtttcactgtgttggccagggtggtcttgaactcctgacctcgtggtctgcccacctcagcctcccaaagtgctgggattacagacgtgagccaccgtgcctgaccttttctgtgtttttttttgtttgtttgttttcttttgtttccttttacctctgacgaagacatagataaaatgcagctcaggtacagaaagtgtcaactttcaggttgattcccagattgagagcaggaatgctgaggaaagcaacagggtaggacttctcatagagtggtccttggatcatctgtattgggatcttcgaggatgtttattaaaaactgagatctaggctgggcgtggtggctcacacctgtaatcccagcactttgggaggccgaggtgggcagatcacaaggtcaggagattgagaccatcctggctaacacggtgaaaacccgtctttactaaaaatacaaaaatcagccgggcatggcggcaggcgcctgtagtcctggctgatggggtggctgaggcaggagaatggcgtgaacccaggaggcggagcctgcagtgagccgagattgcaccactgcactccagcctgggcaacagagcgagactccatctcaaaaacaaacaaccgagatctaggccaggcgcgatggctcgtgtctgtaatcccagcactttgggaggccgaggcgggggatctcttgaggtcaggagttcaagacgagcctggccaacatggtgaaaccctgtctctactaaaaatataaaaattagctgagcatgggggtgtgcacctgtactctcagctactcaggaagatgaggtgggagaattgcttgaacccaggaggcagaggttgcagtgagccgagatcgcgccactgcactccagcctgggcaacagagtgagacggtctcaaaacaaaaacaacaacaaacaaaacaaaaaataccctgagatctatagttatcacttgggccaactgaaagaagaatttctcaaacattgatgtttgagacctactgatttaaggctgaatgtctggttctggaaggaaatggaatcttggcttcttcagtcaccacagtttgggtcttgttcctctgtaaaattaacaatgtaggccggcacggtggttcacgcctgtaatcccagcactttgggagtctgaggcgggtggatcacctgaggtcaggagtttgagaccagcctggccaacatggtggaaccccgtctctactaaaaatacaaaaattagccaggctttggtagcgcatgcctgtaatcccggctactagggaggctgaggcaggagaattgcttgaacctagtgggtagaggtagcagtgagccaagatcacgccactgcactccagcctgagcgacagagcgagactccatttcaaacaaacaaacaaacaaacaaaacccaaaacaataatgtggtccgtgctctctttctttctttgggctcttggaggggtggggtgggaggaccaagagtggataaaattgcacttgcctttataccagaggaggcactgtgaggcagcatctcttacatttacctttcatttatttttctcccccagatgggtttcacttctctctctgtcctgttggggaacttcccagctgaggacctccatgtggtttggtgctcggttgggcgatgagcattgggaggggagcagttgtagtgacttctctcgggcctgccatgctctgccatggaggtggagtgacatgaagtttagctgcttcacctcagtctgctcaagagtggggactgctgagagcagtgaatgggggacagtggaattgcagcctgggatgtgaaacggggatcctgttacctgcagctgtagtcttcacgtgtcctcatcttttgtgactcccctagggccctgagctgagcaagacagacaaacaggaggaagtattaatctttctgcttccatctcatccactagcaagtttggaaggccagtccagttatacccactgcctcgggtgaggacatcagagagttttatgcagctcagttttggggatgttcacacactctggcctcaggaagatccagaagtgagggaaaggctctgggctgggagtgaggaggccttgttctgtgtcagctaagctaccgacgttctttgttaccatgagaaagtcactcgctcactctggacgggagttttcttatctgtaagctgttggatttgagtgagatcatcttttgtgttctcaagttctgattctgtgattaacagtggtaggttgaggcaggtgtggcagagccccgaatgctgctttttctgtcacatgtgcctccctcccccaaaaggaacaagtagtgagttttatttgcatctcttcttgaatagctctgtgtttctaagggctgaagaggcccactgtgggtgtggtgaggagagtctggaggcaggagcttcctttggctctggggaaggaggcccagttggtagcttccctgccattgcacagacttcttatgttccagtaataacatgacttccctccctgttctgcctgcctctctaatattcagtttctagagtaggctatgattgttttgatagatttcccaactgtttcctgcctatgtgtctttgaagcaaatagcaggaaattcttttcatagccatcagggtctctgtttcatatttccccttttccatagaacctgacagatccagggcacagagagacacatgtgcatgttccagctcccagtattcatacagatatggtgaagggtaggtggagttagattcttacggtttggttagtattgtccggggagctcctgtaacacatgtgagattctgtgttctgtgataatgtcttgtatgtcactgctacttaagagtttaaggtgaagctttgtgagtgtattacatgtgtctggtgcatgcgtgtgggtcagaatgtggatcagtggctgctgatgtgctgatgctgagaggaagtgatttaggagctgggcttgctctctttatgtttctgctttttgtgcaatgtcctggtaacttgtcagaggctggataagatgttagaaattttcttaatccagtctgaaatctgccttgttttattcctgggtatgaatcatgtgaggggttgggaggtggaggatgaaattcccataccttctgaatagtccaaggtcagttctcagaaatcagatgttggttgtttagccatcacacccttagatttatgagttggacctagaggatttgatcgcttctgtgacagaggtatcatcctgttcccagaaaactggcgacacgttgacatgcaggaaattggtcagatttatggcttgtttctaaccaacatgtaggcgttctgccctttaaaaacaattaaatttcactgatgtttttcatgtatctaacaagggccagttgctgaattctcaaagataaataaaataagccgggcgtggtggctcacgcctgtaatcccagcactttgggaggccgaggcaggtggatcactaggtcaggagttcaagacaagcctggccaagatggtgaaaccccacttctactaaaaatacaaaaattagccggggtggtggcgggcacctgtaatcccagctacttgggaggctgaggcaggagaatcgcttgaacccaggaggcggaggttgcagtgagccgagatcgcgccactgcactccagcctgggcgacagagtgagactccatctcaaaaaaaaaaaaaaaaaaaaagataaataaaataggatctctttcctcaggaacaaacggtttgtctttttttgaacatggacttctggggctaattctcacagtacccaactgtctgtcttgcaagcctttgggagctctcagaaccagacaggctagctcagtcatgcagcagctgacacaggagagtggggtgtgagtccagccccttgccactttctgactctcccttttaggacacagtggccatgggaaggcaagacactgggctccttaagaaaggctgtggggggaatgtggtggaggtggcaactgcaattatccctcagcttgcccctcatctctccagatacaacagcatggcctcaagcacacccagaagtggagaatgagtgtatgttccctgggggaccagaaatggatttgttagttgttcttacaaactgtagtagtgagatggcagggcaatttgagccttgcggagtcatgagtcatccgtagggaactataattacttctctccattcagaccaggatgctaggcagtagttaaatggggcagggccaggcacggtggctcatggctttaatcccagcaatttgggaggctgaagtgggaggattgcttgaggccaagagtttgagactagcctggccaacttggtgaaaccttgtctctactaaaaatataaaaattaaggctgggcatggtggctcatgcctgtaatccctgtactttgggaggccgaggtgggtggatcacctgaggtcaggagtttgagaccagcctggccaacatggtgaaacccccatctctaccaaaaatacaaaaatttgctgggcgaggtggcacacgcctataatcccagctactcaggaggctgaggcaggagaattgcttgaacccgggaggaggaggttgcagggagctaaaatcttgccagtgtactccagcctgggtgacagagtgagactttgtctaaaaaaaaatatatatgtatatatatatatatttatacacacacacacacgcacacatgcacagatagatagacatagatatctatatatataggtatctatctatatataaaaattagctgggcatggtggtgcacacttgtaatcctagctactcgggaggctgaggcatgagaatcacttgaacccagcaggtggaggttgcagtgagctgagatcataccactgcactccagcctgggtaatagagtgagactccatctcaaaaaaagggagggaggggcatttgtggagaaagatgcacaagaaatgctcaggccaggcatggtggcacatgcctgtaatcccaatcctttgggaggccgaggtgggaggactccttgagcccaggaattcaagaccagtctgggcaacatagcgagaccttatctctaaaaaaaaaaaaaaaaaaaaatttaaaaatttagctgagtatggtgacacatgcctgtagtcccagctacttgagaggctgaggcaagatgatcactagagccttggtggtcgaggctgcagtgagtcatgattgccccacagcactccagcctgagtgacagagggcagagtctgtctcaaaataaaaaaataaaaaagacatactcagaccaactggtgccacatttttgtcggaggctcatacattaagctgctgtcccctccaccacacagaggcacaaaggcagtggcagctgggacttccttccctgttttctcccattcttctaattcttcatgatgcccttttgtgacttctttccccctttaatactgcttttgatatcatttcagcctgatgtcacttgtgcaaaatcactgggggtaggctgggtgaaaattttccaaaccacacattctttttttttttgggacagagtctcactctgttgcacaggctggagtaccatgtcacaatcacgactcactgcagccatgaccttttgggcttaagtgattttcctgcctcagcttccggagcagctggcgcatgcgaccacacttggctaattttttgtagagacagggtctcactttgttgcctacactggtctcaaactcctgggctcatgtgatcctcctgcatcagcctcccaaagtgctaggattatatatcagcttgagctgctgtactcagcccaaaccccacattctttttttatttttgttttttattttttgagacagggtcttgctgtatcacccaggctgaagtgcagtggtgtgaacatacctcactgcagtctcaacctcctgggctcaagcgatcctcccacctcagcctcctgggtagctgagaccacaggtgtgaggtgtgtgccaccacatgtggctaactttttaacttatttttgtagggacggggtcttgctatattgttcaggttagtctctagctcctgggctcaagtgatcctcctgcctcagcctcccatagtgctgggattataggcatgagccactgcgtctggcccaaaccccatgtttttttttttttttttgagacggattctctgtcgcctaggctgcagtgcgatggtgtgatcttggctcactgcaatctctgcctcttgggttcaagtgattctcctgcctcagcctccctagtagccaggattacaggtgcccaccaccgcacccagctaatttttgtttgtatttttagtagagacagggtttcaccatattggccaggatggtctcgaactcctgacctcagctgatccacccacttgggcctctcaaaatgctgggattataggtctgagccaccacgcctggccccaaaccccacattcttaatggcagctctgggccctacataatttcacttcttcagggtgaccctgggaacttaattctaacttgggtcctattgtagctctttaaccaccccaacagctctgtaagtatagttcagcttgagagaaagagacacagagagagaaacttcaagcactgggtgtttggtgccttgggagtcagacagactggacctggatttaaatccactttgttctctattatctgcgtgatcttggacaactgacttaagctctctagggctcaattgcgacatttgtaaaatgaagatgataccatgtaatagttataatagctactgtattgagcactttatatttattaatacagttaatccccatatatctctaggaattaggtactattgtagttgtcatttctcagataagaaaactgaggcatagagaggttaagcagcatgccaacagtaacacaattcttaagttgtggagctgggattctgaacatggaagcccaacctcagagcctgtgtccttaactactgcagtggactatagtccacagaatgttaacaaggattgaggtggggggaaaaaaacaaaaaagccccccaaaaacacaaagcatttaaagtaccaggtatagagcttggcaataagttattaaattacataactgatggcagtaaatggcagctgttgccgccagggtagaaaagcctgttttccaagctgtgtttccccatgggcacacggaggatgtggccctcagtcagggcaaggcaggagagagacgggtcttcccgctgtccagggtttgcaaggtgtcagggcttcttccactccgactctgttagacacagtttgttggcaaagtcttgtttctctaatcccaaagttgcctaacaggccccgaaaggaaaacacaggagcagggtggccataggaaagggctcccttccagtgagccagttgctcaagaatcacttttctcactgcttcagaggaatctggctttttgtatcctgctgtcttacccatttggtcagggctcctggataagctacctggggaacagagtggggcctctgcctaaattggcacaaggtgaagagtcaatgccaagaaacaaaggagaccctgcagggacctggggaaacccaaatctgggcttcaggggaagggagcatcaagcctgctctgattctttgtcatgtatactttggccctctgcctgggcttgtgaatgtcttggttagtcactgagcagttcgggtgcacctgtcccattcaagacaccaactgggttagaggcagcatggtttttggctaaatgtttttatggaagctgaggaacctgcatttcactatagctctgccactttttagttaagttgtgtgatcttgacagtttactcttttgtgagcctcacttttctcatttgagaaaattatgaagatcttttttgagacagagtctcattctgttaccaggctggagtgcagtggcttgatcacagctcactgtagcctcgtcttcctgggctcaagcaattttcccatctcagcctcccaagtagctgggactacagatgtgtgccaccatgcctggctaatttttaaatttcttgtggagatgaagtctctctatattgcccaggctcgtctgaaactgctgggctcaagcagtcctcccacctcagccacctaaagttctggaattataggcgtgagccaccgtgcctggctgaattatgaggatcaaatgacatcatgtacacaaaggccttagaacagcaacttacacattataggtgctcagtaaatgctcatagtcacaggttaggtgcagttgggagctgtggagaaatataaagtacaatctcttgcctttaaggaggttgcagtctagatggggtgagaggtaataagatagaagatcatgtaaatcacaatgttgggaatgcatgtaaaataatactggctggttgtgcgcagtggtattattgtagccaatgaggtttatccgaggtgcaattattgtgaatgggaaactttcgcaataacatcagccaacaagtgtcatggaccatgaaggctttgggagttcagagctatgagagctgccccatgggctaagccagggaaggctttctgaacaagtgagtgttgcaaacctgcaaaggttggagaggaaggtggagggacactccagaaaaagaacagaatgaggccaagtagcataagttcagaggataggaagaaaacagattggaaccaagggcttgtaggagacatgagagggaaatgagattgaataggtgggttgaggtcaggttgtaaagagctttgaatgccgtgctaaggagtttggaatttatctgaaggtttttgaggaggggaatgatgttcatattgtgaccttgatttggccatgtattcttttaatttctctggaccttagatcccttatctatacagtaagaagtttggatcatgtgattgtagaggagtttctctagctagagagtttatgattctatgatacaggaagactattttatttttgtctttatttatttatttatttttgagatggcgtcttgctctgttgcccaggctggagtgcagtggcacgatctcggggctcactgcaagctccgcctcccttgttcacgccattctcctgcctcagcctcctgagtagctgggactacaggtgcccgccaccatgcctggctaattttttttttttgtatttttagtagagacagggtttcaccgtgttagccaggatggtctcaatctcctgacctcgtgatccgcccccctcagcctcctaaagtgctgggattacaggcgtaagccaccgtgcccagccgaggacttcaatatttaaaggagaaagaacaggcaggaggaggaggaggaaagaaaaagaaaggggagggtaggcagtgaggcaaacagttacattcttgggaggctttgattagcactcagtgaattcgcattttacatgtgaaaagaaaggaatggaggggaagtcaattatgcatttatctagtgctcaatagatctacattttacataagataatgtaagactgtgaaattacagctatctgtttaggaacaaaaagaaggcagtttctgcatgactcagttcccaagcttaacttttccctttggcatagtgaatttgggatcccaagattttattttcctttcacaaactcaatacattgattaagtttaagacttcaccatgtgcctcacacatggaatccagtaaatgtttggtgctgtttattcactcattgaattccttaataagcatgtagtttcctgaatgcctgctagatactaagcactatattaggtactaagtatattaatggaaataaaaacatggtggcccttaaggagctcatagtcttttaaaggagacaagtcaaacagttacagaacagaatgacaagcatgggtcaggcacggtggctcatgcctgtaatcccagcactttgggaggctgaggcagttggatcacctgaggtcaggagtttgagactagcttggccaacatggagaaaccccatctctactaaaaatacaaaaattagccaggcatgatgatgggtgcctgtagtcccagctacttgggaggctgaggcaggagaattgcttgaactcgggaggcggaagttgcagtgagctgagatcgtgccattgtactccagcctgggcgacaagagcgagactctgtcgcaaaaaaaaaaaaaaaaaaaaaaaagaataacaagcgttatgattaaaggacaaatcaagtgttacaggagcataggggagggcttactaactcatcctgggatgagaatgctgagaacagagaaaccttttcttttcttctcttttctttctatttttaagagctaagttctgaaagaggagtagaaattgagaggagggccgtctagggagaaggaacaatacacgcaaagtctgtgatgtgagggagtgcaaagtcagtgatgtgttccgggaactgcaagtagctgagcctgttgtcacagagagtacacaggcacagtgattagaagtaatcagggaccagattacgaagagcctggtatgcttggtgaagaagtttagattttatcctcaaggtgatggagaactatacctagattttaggcagggtattgatgtaaccacccaatgggttcttcctgcctgctgtacaaataatgaccacagcattgcagtaaagaaagagtttatgcggtgggacgaaagagtttaattgacacaaggctggccacaccacatgggagatggagttgttattcaaatcaacctcatcttcagctcataggttagaggtttttatttttttcctattttattttattttattattattatactttaagttttagggtacatgtgcacaatgtgcaggtttgttacgtatgtatacgtgtgccatgttggtgtgctgcacccattaactcgtcatttagcattaggtatatctccaaatgctatccctcccccctccccccaggttagaggtttttcaaaggcagtttgggggaaggggttggagtgcttgcggctgattggtttgggtggagatgaaatcataggatcttgaagctgctctctttagcgagttgcttctggctagggccacaggagtggagttggcaggtccaggtggagctctgggtgtcagacatgcaaaaaacctgaaaagatatctcaaaaggccaatctacaacagtgatgttatgtgcaggacatatctggtgaccagtctacagcttagcagaattcaggttcctctcctccctctatcctgatggcctttcattagctttacaaaggtggttgagttttggggaaggtttcttatcatttaaactataaaccaaatgtctcccaaagttagtttagcctaagcataggaatgattaagggaaaggcaagatgggggagcatgggttagataagatctcttactgccatatttttttcactgttataatttttccaaaggcagtatcattgacattagcagacttgtgttttagggtgatctctttgactgtcaaagtggaggacagattgaatctatgagttaggggaagatgaagcccagaagcaggataagttgcgttagctgtgattgctgctttcttctctgggatgcccctttccatctttacagatcttgcctgtagtacttgccatagcaccaggcaaatagaaggcattttacatcatgtgttggttactccactgctgtggcttgtgctaacagtgactggggcactgatttgaaagtaaagtgagcaccctttttcctgtggtcacaaatcaggcaaaattgctttcttggttagaactgacgtggaagatacacacacacacacacacacacacacacacacaaatacacacacacatacaaacacacacatatattttttgaggcagtcactcaatcgcccaggttggagtgcagtggcatgatcttggctcactgcagtctccgcctcctgggttcaagcaagtcttctgccttagcctcctgagtagctgggattacaggcgtgcgccaccacgcccagctaatttttgtattttcatttgagatgaggtttcaccatgttggtcaggctggtcttgaactcctgacctcaaatgatccccctacctcagcctcccaaagtgctgagattacaggcgtgagccatcgtgcccagccagaagatatgtttggctcttctcaagatgtctccataggcattttccattttgtgaagagtctttgttccaaagttgacagtgggttcctttagggcaggaaacatatttttattcatttttgtagtccctggacttatcacaatacgtgatacatactaggcaatgatagatatttgtttcatgaatttgaaattcatgttttgtatttgaaatatgtttcatgaaatatgctgtaaatgttgattaggtgctcggattccccctcaaaagccttttaaatctagagcctaatggggtactgggcatatctaaggcctgagaaggagggaaactctaggaaatggcaggaattagcagaatggaagtaagttacttcccagaagtatttagcagttgaactgagacagttccagaaagattctgggccaaaggtttttagaaagacctactggggagattgggaagttctgaattccttttgctacctactgttatacaaatcgcttttgttcttcctcatatactttaaaatacatttggctggcacagtggctgatgcctgtaatcccaacactttggaaggccaaggtaggaagattgcttgaggccaggagtccaagagcagcctgggcaacacagcaagatctccattaaaaaattagccaggtgtggtggcatgcacctgttgtcccagctacttgggaggctgaggtgagaggatcacttgagcccagcaggtcaaggctgagtgagccatgattataccagggcactccagcctgggtgacagagtgagaccttgtttctggaaaaaaaaaaaaaaagaataaaattggcagggtgcggtggcccacacctataatcccagcatgttgggaggctaaagtgggaggatcacttgagcccaggagttctagagcaacctgagcaatgtagagagaccttgtcttttttttttttttttttcttttgagacagagtctcattctgtcactaggctggagtgcagttgtgcgatctcggctcactgcaacctccgcctcccgggttcaagcgattcttttgcctcagcctccccagtagctggaactacaggcatgcaccaccacacccagctaatttttgtatttttagtagagacagggtttcaccatgttggccaggatggtctcgatctcttgacctcgtgatctgcctgcctcggtctcccaaagtgttaggattacaggcgtgagccaccacgcctggctgagaccttgtctttacaaaaaataaacaaaattagctgggcatggtggtgcacacctatagttccagctacttgagaggctgaggtgagaagatcacttgtgagcccaggaggtcaaggcctcagtgagccaagatggtatcactgcactccagcctgggcaacagagtgagaccccatctaaataaaaataaataaataaataaataaataaataaataaataaataacagttaaactacatgacttgccatggtttcctgattctttgtctttttatgtttcctttcttcgttaggaatgttttttcctttatgccattgtcatcattcttcagtgccctgctgaaatgcttttcatgaaaccttatggaaaaaataatctctccctaccgaagtcatctcaatttttagacccccttgtggtacttaatgctctctacctagaattatatatgggttatcattcttacactagaaggaaggaatcatatgtaatttagctatgagtattccagagtgtctagcacaggtctttgtaaatgttgaatggacaatgtggctgagctgtattactaacttagtgttatgcttacttttacttgtcaacctagctggaccatgacgtgcccagggatttggtcagacattattctgggtgttttttttttttttcccccaagatggaaccttgctctgtcgcccaggctggagtgcaacggcgtgatctcggctcactgcaacctccacctcccaagttcaagcaattctcctgcctcagtctcctgagtagctgggattacaggctcatgccaccacacctggctaatttttgtatttttagtagagacggggtttctacatgttggccaggctggtcttgaactcctgacctcatgatccgcctaccttgtcctcccaaagtgctggattacaggcctgagccactgctcccggcctattctgggtatttctgtgaagatatttttgcatgagattaagatttaaattgatagattgaataaagtagattgctctccctaatatgggtgggcctcatccaatcagttgaaggcctgaatagaataaaaagatttatcctcccttgaggaaaggaattcctcctgcctgaccactttcaaactgggatattggcttcttcctgtctccagactcaaactgaatcatcacctcttgagccttgctggcctttggactgaaactatacaactggctctcttgggtctctagctttccagctcaccctgaagctcttgggacttgtcagcctccataattgtgtgagacaattctttataataaagctctttttacacacacacacacacacacatatcttgttggttctgcttctctggagaaccctactacacttgggttctaaatgttagaagtatcccagggaagggaaaagagtcctatctaccattcctggcacaggattaacatgaggcacactttaaaaatgatgcttacctttgatatcttttcatctcttgcaccctttttttgaactcttctccctcttctaagatttaaggtatataggactttgatgctacccttatccctctactttaatatctgatccaggcctatcttcttcctcatttatggcccaaatttccttttggcccaaatttcctttgcttttgagtcattttcccaatcctaccccattcccattaaagctcccaactcagtgtgttagatggaagctgggtggtaagggaaaagcagtttgtacaagtgattcatgtatagctgaaagctctgtaatcttctcagagtcatttgctaaatgaattggatgaaataccatgtagtttaataaagtgggatgaaaattttaggcagagtgggggtaaaatcttcgagtaactgcccaatgggagttactcaaccctacctggagtcagtcctagggttagcattcctgtgcgcttactgctttgacagattcttcccttttccatctttgaaaccagtttcaccaggggcggtggctcacgcctgtaatcctagcactttgggaggctgaggagggcggatcacctgtggtagggaattcgagaccagcctgaccaatatggagaaacctcgtctctactaaaaatatgaaattagctgggcgtggtggtacatacctgcaatcccagctactcaggaggctgaggcaggagaatcacttgaacccgggaggcagaggttgcggtgagtggagatcgcaccattgcactccagcctgggcaacaagagactcttgtctcaaaaaaaaaaaaaaaaaaagaaaaaaaaagaaaccacagtttctcccaaaacattaacaaacaagcactcccacagaagtagcaatggagattctactgctagcataggaagagagaaagaaggaaaccattagcagtctccactggatttttctaagttagcaactatttatagttttgaaagtcctattttagaagaatatgatttgtttaaaagatgatgagcaaatcagtagttttatattatatgtggtcataagcagagaaaagacctggttataggagagcagattttaatgcggtatggaggcattatgtttgaaatgttgataaatcaaatctgtcgtgaagctggtctggcttaaaatacttaggatctgtcttatcttcagctagctcttcccttccagattttgaaaccagcgcaattgtcccacaggactaatgtttacaggtttttttaataaacatagaaattgaccttccctagtcttagaactctaaacttgtatctgtctcatctgagttccttccttaggaaacctaccctcaggcaaggaactgaaacccatcagatcctcacacccagacaacgagataccagactcctcatccatcgtgactgcttccctacccctccctaatttctgttttcccaccttccctgctatataaactccccagtttcagtctgtcagagattgatctgagactttatctcctgttgaccttcactgcagcaccagattcaagccctccttcctggaaatacttgttgactcagtgactggcattctgtgcagcaaaccgcaggactaggctgaatgcttggtatttcagtaataatttcctgtgagaaggaaggaagtagttagaagaaagagcatgatcgtaataggaaactaaaaactgtgcatctatttcaatatttcaatatttaaatatatttaagcctgtcttatattaaaaaatcccctttttgaactctacttctcttactggcttctaccgtatcactctcttctttttttagaagcaaacatttatttatttatgcttattatttttttttgagacagtatctcgctctgttgcccaggctggagtgcagtgttgcaatctcggtttaccgcaacctcctaccgagttcaagcaattctcctgcctcagcctctcaagtacctgggactacaggcatgtaccaccacgcccggctaatttttgtatttttagtagagacggggtttcaccatattggccacgctggtcttaaactcctgacctcaggtgatctgctctcctcggcctcccagattgctgggattacaggcttgagccaccgtgcctggcctaaactaatacttaaaaagagtttatagttactatctccatttacttatctcccatctactcctgagcatcctagagtagatttattcccgttgtgcaaccaaaactactcttaccagtgtcgccaatgatgacacagttgcaaaatagaatgaccctttcacccttgttttacttggcgttgcagcccacttaccacagtccgccagtgctttgctttggaactgctgctctggccctcacactgttgggttctcttctacctcttcgcccgttccttttgagttttccttaccaccttctctgatgtgtccattccattccttaaatgtcattggtctgtagggttctgtcctaatgtcctcttctctttctatatactcatgttccctctgtgacttcagttataattgatacctgatgaatggcccatctctctctctctctctttttttttttttttgagatggtgtcttgctctgttgccccggctggaatgcagtggtgtgatctcggctcactgcaacctctgcctcctgggttcatgccattctcctgcctcagcctcccgagtagctgggactacaggtgcccaccaccacgcctggctaattttttgtatttttagtagagacggggtttcactgtgttagccaggatggtctcaatctcctgaccttgtgatctgcccgcctcgccctcccaaagtgctgggattacaggcgtgagccatcacgccggccatctctctctctctttaaacagagatggggtcttactctttcgcccaggatagaatgcagtggtgcgatcatagctcactataacttttaactcctggactcaagcaatccttccactttagcatcccaaagtgctgggatacaggtgtgagccactgtaaccagctaattttttttttttttttttgagacagagtctcgctctgttgcccaggctggaatgcagtggcgcaatctcagctcactgcaagctctgccttccgggttcactccattctcctgcctcagcctcccgagtagctgggactacaggtgcccgccaccacgcccagctaatttttttgtatttttagtagagatggggtttcaccgtgttagccaggatggtctccatctcctgacctcgtgatccgcccacctcggcctcccaaagtgctgggattacaggtgtgagccaccgtgcctggccaactgtgcccagctaattaaaaactttttttttttttttttggtagagacagggtcttgctatgttgaacaggctgatcttgaactcctctggcttcgagctattcagctacctaagcctttcaaagggctggggttacaggtgtgagcgactgtgcctgtcctccatctctctcgttctctctctctctctttttttttttttttttttttttttttttgagacagagtctccctctgtcgcccaggctggagtgcagtgacatgatctctgctcactgaaacctctccctcccgggttcaagcgattctcctgcctcagcctcccaggtagctgagattacaggtgcccaccaccacacctggctagtttttgtatttttagtagagacagcgtttcgccttgttggccaggctggtctcaaactactgacctcaagtgatccgcctgccttggcctcccaaagtgctggaattacaggtgtgagccactgcacccagccctccatctctctggaattgtatatctcaacagtttattggacatctgcttttgaatatgcaacatgtccaaaaaaactgaacttatcttgcctctaaacttgattgtttaaaacaaaattttagccaggtgcagcagctcacacctgtaatcccagcacttttgggaggctgaggcgggaggattgcttgagtccaggagtttgtgaccaagcaaagagtaagaccccatctccatttaaagagagacagagatggctgggcgcgatggctcatgcctgtgacctgggcaacataatgagacttcatgtcttaaaaaaaaaaaattagctcggcgtggtggcatgtgcctatagtaccaggtactcaggaggtcgggattgcttgagccccggaggttgagtctgcagtgaactgtgatcacatgactgcactgtagcctaggtgacagagtgagaccctgtctcaaaaaattaaaaaaaaaaatttcagtggatggtaccccacaaagatccacaccggaaatctggccaccatctttgattactcttttatcacccccacatctagtcgatcactcagtcttgacaatactacctgctaaatatctctcaagctgtccacttctttttccaaccttactcacactactgattcagccatttccttttctagatcactgcagcagccttctctctgattccacttttttgtcttcagtctaattccatgccactctaattcattttctgcagtgtgggtgaagtggatgtatgaaacaaaattctaatcacattttccctaatattaaagccctttaaatggttctctgttgccctcaggatgcactttgatctcttcaatagggcccccaagctttttttgttgttgttatattacaaatttaaaagaactcagtcttctccagcttcatctgtgctaatcctgcccccacctttcccccattcttgtactccaggtacacaacacatactttaattccttaaatacccctgttctctattgtatctgggcctttgcagttattctgtctgcctagaatgctcctgttacgcctctttcttatcaactttagttatctttggtttagacatcccttcttctgtgctatgctatgctaacaccccaaccccaggtcatgcttctgaagtacccagtacttacccctgtgtagcgcttaccatgccctctcaagattacctggtgaatgtattgtaagcattttgtatgcagggactacatgtctcactattgaatcctgggtcctagaaaagtagctatcacataatagatgctcagtaaatacacatcgttactttggctatgtttgccattaaatcaattaaacaagtggtacaaagctggtagggaatgaccaaaaatggggtcctaggcttcaatgttaggtttttttttttaaaagtaaagtcaaagttcagattattgcagttttacaggttggctatgggtcttaatgggcttatgggatattacaactgaatctaaactctgtccagctggtacagtctttatccaggcttcagtgttcttttttttcttaaaaaaaaaaaagctttattgagatataatttatatgccataccactcacccatttaaagtatattcctcaatgattttttcccagagcaagagtggaagtttattttattttattttatttttatttatttatttttttttaaaaatggccatgcatctgctctttaatgttttcctatgatgtattaaaataaaaacaaagtttcagtctcttcacaagaagtaatttatattctctgaattttttcagccacaacaactggattctcttttctgatttttgctgcagcttctgctttgtaatcatacggacagttgtgcttgtcagagttaacggtgaagtccacaaaacaaatttccacatcggcagtcaaacctgtaagaccaactttctttctgcacatgaaacatctgtttttctttggtttgggcaattcaggagctttttctttactctgagaagtactgggctgaaaaactgatgggctgggctgagtgacaactggctctcacacctctgttttcggggtagttattttgtcctctgttgaaatgctcatttctgtcatttgctgagttacaggcaaggcagccgcaggcacatttcttgatttttcagatgtgctgccagcagcaccttcacagttgtttaagctagtgtctgctctctgtacagatgcagaatctgaggtaggactgttggaaccactagctgtccccattgggctcattctgccactattctgctgcctctgaagatgttctttgtagcaaactgaacacattccatttgtcctaggatttccataaaagccacatcctgtgctacacagcatgggccccggggtctggttagtctcctgagccatatttttctgccaggtctgagttccaaccatccccatggccaaagggattttattttatttttaagatggagtcttgctcttgtcgtccagggtggagtgcaatggtgtgatttcggctcacggcaacctctgcctcctgggttcaaacgattctcctgccgcaacctcctgagcagctgggattacaggcgcctgccaccatgcccagctaattttttttttttgtatttttaatagagatgaggtttcaccatgttggccaggctggtctccaactcctgacctcaggtgatccacccacctcggcttcccaaagtgcttgggattacaggtgtaagccaccgcgcctggctggaagtttatttttaaaagtctttagaaaataaaaaaagagaaagtatgcttggaagacacccaagtgcgtgacttgaagaacaagtgcctgatttttagtatagtcacagaattgtgtaactgtcaccataatcaatcttcagaacatattcatcaccccagcaagaaaccccatacccattagtaattgctccttttttcaccccacccttcagcctcctctctccagcccctgggaaccctaatctacttctttgtttctgtgaacttgcctattctcaatatttcatatgaatggaataatatgtgttcttgtgactggcttctttcacttagcataatgttttcaaactttatccatgttgtatcatgtatcaatactttatttctttttattttttacttaaaatttttttcctatacagatgaagtctcactgtattacccaggctggtctcaaacaactgggctcaagcgatcctcccaccttggcctttcaaattgttgggattataggtgtgagccactgtgcccagccccgtttctttttattgccaaataatcttccattatatgtatataccacgttttgtaaatccattcatcagttggtggacatttgagttgtttctgcttttggctattacaaacaatgctgcttatgaacattttctttctttctaagagatggagtgttgctcggatcactgaaacctccgtctttccagttcaaatgattctcctggcccagccttctgagtagctgggattacaggtgcacacaactacacccagctaatattggtatttttagtagagacgcagtttcaccatgttggccaggctggtcttgaactcctgagctcaagtgatctgcccacctcagcctcccaaagtgctgggattacaggggtgagccatcaagcccagccgtggacatctgtgtatgagtttttgtatagacatgtttttatttctcttgggtatatacctaggagtgcaattgttgggtcatattattaccagaatggggtcctgatcaagtccccaagagagggttcttggatcttacacaggaaagaagtcagggtaagtctatagagtaaagtgaaagcaagtttattagagaagaaacaaaagaatggctggtccataggcagagcagccctgagggctgctggttggatatttttgtggttatttcttgattatatgctacatatggggtggattattcatgagttttccaggaaaggggtggcgatttcttggaactgagggttccttttcctttttgaccatttagggtaacttctagacattgccatggtatttgtaaactgtcgtggcactggtgggagtgtcttctagcatggttacacattataattagtgtataaagagcaatgaggacaaccagaagtcagttccatctgtatcttggtttgggcgtgttttggccagcttctttactgcatcctgttttatcagcagggtctttgtgacctgtatcttgtgctgacctcctatctcatcctgcaactaagaatgcctaatctgggaatgcagcccagcaggtctcagctttattttacccagaccctgttcaagatgcagttgctctggttcaaacacttctgacatatttcccccctcctttttacaaggggatctttaatcctaagggttgcagaggggcaaagatccatccactgtaacttctttaggctgactaggggcaatgatattcctgcctattagggtctcttgtatccagggtagagaggagctcagtcagaaagcctcagtatggtgagggcccgtcataactctgagttctgacaaaaggtgatatctgaaagactaataagtgctcaatttaagaaaacattgaataagcttttcttgcatttttacacaaagaatatgacagcaatatattccacaaaagtaaagcgaaataagtaaaattattccaagtgaactaaataagaaagcttttcatgaacggggcagttgttggaaccaagctgatacagtcactagctgattccaatacatgcccagaattaaaatattgatccagatttttacattaccttccccttttgtttcttctgagcagcagccagagatcactggttggttcacaggaagaagcagagtcagtctaaattgcagaaaaaactcaacagatgagactagaatctaataacaggtgtatcacggtttttgaaaaataatttttctctcattcccatttttattaaaaacaaatcatggtaggactcatttatttgcaaactaagttttagtcttattatactaggtctgattatttgtataaagtgcagcaagagtaattatttgccatataggctctttttaaattggatttgatggaactttgttccataaggaatctcagattagagcttttaaagcactgatcctagccacgggtttgtaccttcaaatactcgtatgaattgggtacatttctttcctctcaatttcccaggataattgggactcctgggccagaaagtgacatttttggccaggtgtggtcgtcacacctgtaaccccagcacttttggaggctgaggtgggttgattacttgacgtcaggagtttgagaccagcctggctaacatggtgaaaagcctgtctctactaataatacaaaaaaaatttagcctggcatagtggcacatgcctataatcccagctgctcggaggctgagttaggagaatcacttgaacgtgggaggcggaggttgcagtaagccaagatcatatcactgcactccagcctgggtgacagagtgaaacactctctcaaaaaaaaaaaaaaaaaaaaagtgacattctttagaaagtgacattctttacttaccacaggtcaggatcgctgtacaaggactgcatagacaaggcacgaggccagttttcccagggggctttttctgactctgtaagtcaactttgattccttaaaagtagtctttttgtacctggcatgccattccagtcaaagccttcataaaagaaccattgtctccaatggtgtcctgttacgaaagaaaacagattgttattgtacttgtgcaaatattgccatagtcaagaatacttacagtttccaaattttggagaaagaaatatgctccaaattttctttataggaatatattttacttgttaaaagctgtaaatagctcaaaagaaaagtattcttgactctgaaaagacagaaaggatcagcaatgttttaggcaaaaagtcataaaaagattattttcatcttttgttagttcagtctatgcaattagttcctgtttcactcaacatttatgtacacattagttttccaagagagtctttgaagttctttcttctctattttaatggcacactttccaaagttatcaaaggcctgcatttaagagtactcatcagagtcctatagctgattataaactgctctttaaagaggatcaaaataagacaacaattgtctgtggatgacaaaaattattatggcagtcatggttacttctgtggcatacaacaattttacaaaacaattataattattactgataatatacactaagtcatatcagtattataggagtatagcataattttggaaaacataccaataacacatttatacaaatacacccaaagaaagccaaacactgtttcatatttgacagtgcttcctgtatgattttaatataccaaataagccaaatatgtctcttttggactttagggtacctgatatctaaaggattaatcaggtcagaaaaaggcaacttataatttgattttggaaagttttcaaatattaaagttttaaaatacttgatataaaatagaatcccagcacactgtaagtcattgagccaaaatgataaagattttaaaaagggaaaaacctggccgggcatggtggctcacgcctgtaatcccagcactttgggaggctgaggtgggcggatcataaggtcaggagtttgagaccagcctggccaatatggtgaaaccccgtctcactaaaaatacaaaaaattagccaggcgtggtggtgcacgcctgtaatcccagctactcgggaggctgaggcaggagaattgcttgaacccgggaggcggaggtttcagtgagccaagattgttccactgcactccagcctgggtgacagagtgagactctacctgaaaaaaaaaaaaaaaaaaaaaaagggggggaaaacctttactcattgatagagggaagacttagctttccaaataattttctcttttctttcattctttttcctgtagtttattcaaaaggcaaacaaaaatctttcattaaaaaaaattacacaaaaatcttgttcaagagtgaaagccaagtctcacctttatgttagtgtactatattgatgttaaatccagttcttaataaaacctaatagacaaatctgttcaggtgcaatggctcatgcctgtaatcctaacactttgggaggctgaggcaggagaatcacttgagcccaggagttcaagaccagcctgggcaacacagtgagaccctgtctcttaaaaaaaaaaaaaaaatcttttttttttttttttttttttgagatggagtcttactctgtcaccaggctggagtgcagtggtgtgatcttggctcactgcaatttccacctcccaggttcatgccattcccctgcctcagcctcccgagtagctgggattacaggtgtgcatcgccacacccagctaatttttgtatttttagtagagacaggatttcaccatgttggccaggatggtcttgatctcctgaccttatgatccacccgccttggcctcccacagtgctgggattacaggcgtgagccaccgtgcctggccaaaaaaaaaaatcttatacacaaatctgcctaatcttaatcgttttatcataaggttagattcttataaaccttttataactctttacagtttttttttggttaaagaatagaaccatgctctaagaaagccatgttatgcttttattccaatgttcaatttacagataaattgaataatacccctttaattttagccagtatattctcatacagaatttcttttacaacactaatctttcataaacctttcacaacttactcaaacatcagctttatcctatcctttaactctctaaattagggaaaaaaacacatccccatactttcttataatcttttaccaaaaacacattctactttccttatataccttgcatgtaaaactgtttctctagtagtctcaattacatatgttacaatgttaactcttagcaacttttatttttggtgaaagacctggtaagtaagcaattttatttatgtgccaggtgtgtagcctaggacaccagacagaaatgcagataaggtctgactatttccaacatagttgggggcatggataactccatatgtccccaggccttacctagaatctagctacaaagcaggtaagttgtacaagtatcaaaagtcaaagaagtagtttataaccttaaaccgtctagcaaagatagtatttgacctacctaatttagactaaatgtcttaagttttgaagatgtttttattttaccaataatcttgaaaagtgtctttatttcataaagattactaaagtcatgtgaactaaaaggcattaaagtttttatttttctgacaaaatatttgatttcagcacttttcttaaagccaattaattggagctttttatataaataccacacacacaacacatataaatacacagacaagaaaaacaaaaacaagaacaaaaaacaaaacttagatacacagacagaagcagaaccaatagttgtaagatttttcatttgccagtttttaagtttttctttcccattttatgaaccctatcatgacttacacagaccatctagactttctaacttgtcttacatttccctttttcctaaataatcagtcattctactttaggacaaggatttaccatacaagatcttttctcacataatatttcttttctttataactttccttaccaaaaatacatcttcatatccataactttcttcacacctctctcccctactgtttttttctctttctaccttttttctattttcttctgtcccctgtcctaattgtcagctaagcaatactaaattacatttccaaagggccaactcttagatgaaacaaaatagagaattcatgttttattcaaaccaaggaaaagtggtgtgaataacagttcagttaagacagccagggccaggcgtggtggcttatgcctgtaatcccagcactttgggaggccaagttgggtggattacctgaggtcaggagtttgtgatcagcctggccaacatggtgaaacccagtctctaataaaaaaatacaaaattagctggacatgatggcgggtgcctgtaatcccagctactcgggaggctgaggcaggagaaacacttgaacctgggaggtggaggttgcagtgagccgagattgcaccattgcactccagccttggaaacaagagcaaaactctgtctcaaaaaaaaaaaaaaaaaaaaaaaaagacagctaggaaaaacatacactcttacacatggagatttctctaaggatgtaagttaagttaattactgactggctttcgggtggagccttttaaagaacaatgccagggaagcatgcggtttctagaacctaataagcagacacagctggaaggcaaaacagattccccaagaattaacggacccattttttttttttttgagatggagtctcgctctgtcgtccaggctggagtgcagtggcgcggtctcagctcactgcaagctccccttcctgggttcacaccattctcctgcctcagcctcccgagtagctgggaccacaggctcccgccaccacacccggctaattttttgtatttttagtagagacggggtttcactgtgctagccaggatggtctctaatctcctgacctcgtgatctgcccgcctcggcctcccaaagtgctgggattacaggcatgagccactgggccctgccaagggacccatttttgtactggatcctggatcccaaaaaagaggtaatcagcccatctcccatgggagacttatctctcagtgggagttgtggatgtttccataccttttaggtggctgagagcatgtttctctgatccaaacatgcaaagagctgagtatccccccataactgccattagccgtcccttaaatatatttcctacctagttattacacatggaggctaaaagctctctcataatgcaaagtaatttcttttttttcttttttgagacagagtttctctcttgttgcccaggctggagtgcaatggcgcaatcttggctcactgcaacctccgcctcccaggttcaagcaattctcctgcctcagcctcccgagtagctgggattataggcatgcaccaccatgccccgctaattttgtatttttagtagagacggggtttctccatgttgaggctggtctcaaactcctgacctcaggtgatccacctgcctcggcctcccaaagtgtggggattacaggcgtgagccactgcacccggccaatgcaaagtaatttctgataccccccaaaaatcaaaatgtcaggtaatgcagtgcaaaacagaacagagccttagattttgagaggcatctatcctcttttattttgtattttttgagacagagtcttgctctgtcacccaggctggagtgcagtggtgtaatctcagctcactgcaaactccgcctcatgagttaaagcaattctctgcctcagcctcctaagtagctgggattacaggcgcccgccaccatgctcagctaatttttgtatttttagtagagatgaggtttcagtatcttggctggtcttgaactcctgacctcgtgatcgacctgcctcagcctcccaaagtgctgggattacaggtgtgagccaccgtgcccggcctatccacttttaattgctggggttccatgaagaaaagagaagtttccccaaaatggggtctgtgtcacccctgtttttcccaaggagtcccagctgtcagaaattatcttaggtcctcttatgtgggcatgaaggtggcaagaataaaaactggagaaagagaattcagtcgtctgagaagaaaaagtttttgttttttccagaaaagtaagatccaagaaaaaaaccataaaggcctttaaaacgtatgcatcgcttggacatctgctttaaattaagccagcttttaaccaaatctcttattactagattctagttaagacaaacagccaatatttctggcttttggactttaccaaaggtaacttcccagatgaaaccaataagttttaactaaggttatgacttaactgtgggtgtaccgggtatttccaaagagttggtaagcagtttttacaagatatagaatctctaaaggtagcacagagaaaggaaaatttgagaagggaagccagaagttgttcatggatgggggcacatgttctcaggatctcctgagggttatgtcatgggcaaaaacaaacaaacaaaaagtaataaaaataaaaaataaaaaagaagttgttcatggagaggaaaggaattaataaatggtaaaggtcacacaaataaaccagaaaggacttattccccaggctggaaattgaacccaggccaccattgtgaaaagatgaaatcttagctactgagctacaacattgggcagtttctgttattcttcccagaaggagcctagagcagccaattttgaacttgctaaggcttttaactgctcaagataatttttagggctgtgacatgagcccccaaattcctgccctccagatggcagagaccaagagaaagtaccatggttacaatgtcagactcccaaggacataaaacaagatgaaggagaaacctcatccaggtttttggtttgtttgtttgttttgttttttggtttcattaaccagcagcaatttgtaactgaacagctttctggggtggcttgaacagagggcttacaggggtccttggcctgcattctatcctgtggtatctctttttatgacagaacgacacagaaagacaaattcatagcacaaattacactggatttgttacagcctaagattagcttcataaatcctttttcccagtaatgaaaactttgcagaggagataaaaagtgatttttaccatgcattcaactggtttgcgcacagagagagagaggaaagggaagggagagggagaaaagcattgcctgcagcagggcaggggaggcaaggagctcggggggccagggaaagacccacccattgcagcgacactggatcaaatgttcaggcagctgatcgtcagtcttgaagggatcttttctggtagtctcattggctctcaagtttccccctttagggagaaaaaagctccctgtgtcccacgatcctgtacatgcctaatcctatcactcatagccttcagcaaagagcgcaaggcagattaatccaaagagaatagtggttaacatcccgtagtaccaaatccatttttaaccaagaacagtgttaccaagggagacctctaactccctatgtcttaggagggactctgaccttcctaagttgagcctttaacccaagttcagacaagcgtctttgccctttactgtgatgggccttttaaccccttatgcctgcctgtctgcctgcctgcctgcctgcctgcctgcctgccttccttccttccttccttccttcctccctccctccctccctctctccctctctccccctttccctccttcctttccatcttccttcctccctccctccctccctccctcccatcttccttcctccctccctcccttccttccttccttttctcttttaatatataaaaatttttagctaatcttctgtgtatcagtccaattttagtatatgtgttgctgaagcgagcacaacccgctatgtcttagaaggtattctaaccctttcaggttgggcctctaacccaactttgtcctttacccaggataaaatgtaccccagcacttacccagagtcagccaattggtgctgcatggataattttcctttggagtcgggggtctctccagtattgtcccttcatggttctctggaagatgttatgggaaatgggccccaatccagaccccaagagagggttcttggatcttgcacaagaaagaattcagggcaagtccataaagtgaaagcaaggttattagagaagtaaagaaacaaaagaatggctactccataggtagagcagccctgagtgctgctagttggctatttttatggttattttttgatcatgtgctaaatatagggtgaattattcatgagttttccaaggaaggggcagggatttctcagaactgagggctcctctttttttttagaccatatagggtaacttccagacattgccatggcatttgcaaactgccatggtgctggggggagtgtcttctagcatgctaatacattataattagtgtataatgagcagtgagagcaaccagaggtcagtttcatcgctatgttggttttggtgggttttgaccaccttctttactgcatcctgttttatcagcaggggatttgtgacctgtatcttgtgttgaccttctagctcatcctgcagctaagaatgcctaacctcctgggaatgcagcccagcagatctcagcctcattttacccagccccagttcaatatggagttgctctggttcgaacacctctgacagtatggagggtttacaattcttaagaagagagaagttgctgagctttagagaataagctgaaacatgcatgaagcactaataactcttgccctgtactttgttactttagtgataaattttacagctggttctttgaataatttatattaattaagtttctctgtctgatgtgaagtagccagtgaataagcaaagcctaattctccaataaagataataaagcccttcttgagttaaatggaagtgggagaatgtcatgtctgtttctgtccatttccattcctgctccttctcctctggacgaaacagggctggctgatggaattaaccaggaaggcttcaaatggggaaattggctcatttaaactcctgctagtattaaactgttcctcagtcctatgtaagttaagacaaaaaagttatgaaactcatgtgagttataggtataggattctgttaacaagtatatcatatccagataaatatgggcaccttaaaagtagttgtcctgggaataaatacacatctattcaaaaaattctgtcatcattactcaaaatattttggtcaacttgccatgtagagttactttcaaaaccagtctgaggcctacaagaaaatcagtttcacttccttataatcacacttaggatttcagatacttgctagtctgtttatgtttattggccttttttaaatagttacccctttttatttctctagccccaagcaaggaaagctctgggttcacatagtgctccaagtacaggacaaggctcacatcatacagagcctaagcaatgaagaaagattggcatgcttcacaagactttgacctttaaacaaagcatggtcagtctgttttctccagtgtcctgtttctgctttgtgatcccctcccccactctttttgtattaaagaacccttaaacctgaggctggggacatggccttgaattgtcctctcagaggaaactgggagaatgggtagagcgaggtacttcagaggtctctttttccttctgctcgtgggtagttagttaatgatctaccagcagtccccactcttggggagactgggatcatgttccagccgcacatcacagcttagggcagagggcactttgtacacagagggagctgcatctgactttcctacttcatctgtagagtcagtagccatctgtagtcttgcatgttctcagttttcaggctccggatatgaaaatggatctttcaattttctttctctctgactctgctctgagggaaaatgaggacgtttactagcagaggaaaaagaaatactgaagtttgcaaaaattgatagaaagctgggctccctgctcatcatgcctccttcctccctagcagtttctaaaccctcagaacattacagtgagattttagctgatggtacaaacatgtctacaggatttcctcaagctggggctacattagaaggctttatactttggccatctgacctgcttttctcttttccagagtattctacttttcacaaataggtatgatctaggagttcagcctccctcacccttcactaattgcagaataagcaatgcagaggctgttcagagagtatcttatctgtggggagagggagaggaagcactggaacacttgccaggggagggaccagagggcataattataaatgaacaaccctggagcagaataggggatgagttagacacaggaaggaagctaaaggaagccagagaatttcaggaattgagggtatcacatggagaaataaagagcgagttagacagaggctgttggtggtccctaccctgacacctgaaagaactcctgatcaaggcctactatgggcatagtcttaggctaggttttagggataaagagataaataagacacagtccttattttacaagtttacagtctaacaaaaaggagataaattaacaaattggaggagatttttcagaatgtgtggtattgtgggctaggagtctgctaccattgctaatagctggcatttattttttacccaccgtcttctaagcattttatgcattaaataactcatcaactcctgacatcggccccttgaagtatatattactattgctataatccttgttttataggtaaagaatctgaggcacagaggcattacacatagcctgcctgaggtctcacagcaggcactcagaagcagaactccagcacaggtagtctggttctagaacctacgctcacactaacatagctgctaataagtcatgtggggaagctctgccacttcatgtctacatgcctttgtacccgcttgtctttccttggcctgagatactcttccttaaagcctctggtcaacgagggactcttctttgatatcttctctgactccttctgcctatcccagagccattgctgcccttggagcttacccaacactttgtcattgtattctatttgttggaatgtctgactccttttattataagcttctggagagcaaggaatttttattctcggaaaacagttataaaagtagagccaataatataatgagtttacatgtacttatcatccagcttcagtgatgaacatttcagttcaatcttagctcatctatattcccccttccaaccatgaattattttgtagaaaatcatagacatcaaatcatttcatctgtagatatttcaacttactcctaaaatacaagggcattttaagaaacagtatcacaagcatatcagaaaacattatcacagtaaaagattatttcctccttggctgggcgcggtggctcacacctgtaatcccagcactttgggaggccaaggcaggtgaatcacaaggtcaggagatcgagaccatcctggctagcacagtgaaaccccgtctctactaaaaatacaaaaaaattagccgggtgtggtggtgggaggctgaggcaggagaatggtgtgaacctgggaggtggagcttgcagtgagcggagatcacgccactgcactccagcctgggtgacagagcgagactccatctcaaaaaaaaaaaaaaaaaaaaaaaaagattatttcctccttaatatcataaaatatccagccaatgatcaaatttctgcaattaccttataattgttcttcctttccgtttttcatttatttgttctttgattccttcctttgttctttccctccctcctcttcttttttaaatagtaagattgtttgaaccagaatccaaatcagaaggactttattttttaatgttcatattctctttaatacctagcttagtatttgacatatagtaagtcctcaataaatgtttgttaaacaaataatcagaaacctagaaaaggtcctgtttgatatttggttggtttcttggaatgcctttcaatttctgataaccttagtttttcaggggttaactttggtgctagctattgtcagtgtatgaacattgccagaggtttgagggcaatgggtatatccttgactcagacatttctaggctaggaggaaatgggggtccttttttttttttttttttttttttgctttgagacagagtctcatgctgtcacccaggttgcagtgcagtggcatgaccttggctcactgcaacctctaccttccaagttcaagtgattcttgcgccccagcctcccaagtagctgggattacaggcacgcaccaccatacccagctaattttttgtatttttagtagagacggggtttcaccatgttgccaaggctggtcttgaactcctggcctcaggtgatccgcctgcctcggcctcccaaagtgttgggattacaggtgtgagccactgcgcctggcctggtccttgctttcttgtttctgttttttgtccttggtctctgtcatgggctgaattgtgttcccttaaaattcttctgttgaaaccctaacccctggtgtctcagaatgtgactttatttggaaataggggctttaaaggtgattaagataatgcctgtagggtgggccctaattgattctgactgctgtccttgaagaggaaattgggacacaatgagagacaccacagatgtgtaggtacagagaagagaccatgtgaggagacagcaagaaggcacctccaaaactatgagaaattaatttctgttgtttaagcaattcaggctttctggtactcagccatatagtcatatggcagccatatagtgttatagcagactaataacagtatcttactgcacgttaaattgtcgctcactcctgtaatcccagcacttgtttaggccgaggcaggaagattgcttctgttcagaagttcaagaacagcctgggcaacacagtgagaccctgtctctacaacaaataaaaatattagccccatgtggtggtatgcgcttgtggtcccacctattcaggaggctgagcctgggaatcgcctgagtctgggaggtcaagactgcaattagccatgattgtgccactacactccagcctgggcaacatagtgagatcctgtctcaaaaaataaaagttgggggccaggcacagtggctgacacctataatcccagcactctgggaggccaaggtaggtggatcacttgaggccaggagtttgagaccagcctgaccaacatggcaaaaccccatctctactaaaaagaatacaaaaattagcctggtgtggtagcatgcacctgtaatcccagctactcaggaggctgaggcacgagaatcacttgagcccaggataccgaggttgcattgggctgagattgtgccactatactccagcttgggtgacagagtgagactgtctcaaaaaaaaacaaaacaaaaagttggattgatcatttttggcttctttgccacttcctcagaacaggattgtaaaggagtttccagaaagcaccagtggctttatgtgtgcttggtacacagaattctaagatggcccctaatacctagaactatgaatatgatgagaaaccacacccacgattatgttaccttgtgtggcaaacaggattttgaagacataattaaggttacaacttagttgattttgaattaatcagaagggaaatgatctgagtggacctaatgtaatcacatgagctttttaaaagcaaaatcagagctttttctcaggctggtctcagaagggaaaatcagagatagtagaagtgtgagagggatttgacttgagagaggttctccatggctaagatggaggaggtcacagtgctaggacctgaaaaggtcttctaggagctaataatagtccctggccgacaacaggacagtggggaactcaaactgacttcaaggaactgaattctgcaaactaatgagtaagtgttgttttaagccactaaattagtggcggtttattgtatagcaatagaacatgaatacaggtgctttgtacctgatagattgaattagtggctcctttccttagtttatatttaaaacttgaagtaaaattaaaatacattgaaatgtctatagatctcaagtatacaagttgatttttggtaaatgtgtatacccatgcaatcactacctgaattgagatgtagaacatttccatcagccccagagctcccttgagcatctttgtcattaatcccaccctctagggcgaattctgtttttttttttttgagagagagtctcgctcctctgtcacccaggctggagtgcaatggctcgatctcggctcactgcaagctctgcctcctgggttcatctcattctcctgcctcagcctcacgattagctgggactacaggcagttgtcaacacgcccggctaattttttgtattttttagtagagacggggtttcaccgtgttagcaggatggtctagatctcctgactttgtgatccgcctgcctcggcctcccaaagtgctgggattacaggtgtgagccatcgcgcctggcctagggcgaattcttaacatctttaattggaattgcctattctggagcttcatttaaatggcatcatataggctgggcataatggctcatgcttgtaattccagcactttgggagggccgaggcgggaagatcacttgcctccaggagttcaagaccagtctgggcaacatagcgagacctcctctctataaaaaataaaaaattagccgggtgtggtggtggcatgcatctgtagtcccagctactgaggaggttgaagtgggaggattacttgagcctgggaggtcaaggctgcagtaagccgtgatcgtgccactacactcggcctgggtgacagagtgagaccccctctgaaaaagaacaatgacattatatagcatgcactcctttgtgtctggcttcttttgcatggtataatgttttcaagatttatcttttttttttttgagatgcagtcttgctctgtcaccaggttggagtgcagtggtgtgatctcggctcactgcaacctctgcctcccgggttcaagcgattctcctgcttcagcctcccaagaagctgggactacaggcgcgcaccaccatgcccagctaatttttgtattttttgtacagacagggtttcaccatgttggccaggatggtctcgatctcttgacctcatgatccacctgcctcggcctcccaaagtgctgggattacaggcgtgagccaccacgcgtccttacagggagggtctcattctgttgtgcaggccggagtgccatagtatgatcatagctcactgcagctttgaactcctggtctcaagcagatccttccaccttggcctcctaaagtgctgagattgaaggtatgagccatgctgccagcccatccattttgttttgtctgtagattgtaccctttgattgctgattagtatactatggtatggatattccgtaatttgtttatccattcatctgctgatagacatttgggtttccagtttttggctattatgaataatactgctatgagcattcatgtacaactgtttgtgtggatatgtattttcatttctcttgggtaaatatctatgagtaggattgctggattgtaaaagtgtatattgaactttataagaaagtgtcaactgttttctagagtgggtgtgccattttatatttcccctagcaatacataagaataccaatcattccccatcctcacttggtatggtcaaatcttttaaagttcagccagttgccaacaatttcttcttgagtacctctctgtgctttgcagaatagattattcatctcatgcccatcatatagtatgtccttccaactctttttataatttaattcctacctgtgcttcaggacactgtttcctaacacggaataaatgtgagaatcacttgggagtgtttcagaatacacaagcccaggtctcactacaggcatattgtatcagcttttccagggatggtatatatacttacgtatgttgaaaacgttccctaggtaattctgatgcatacccctagctaaaaaccattgatttagccccaggtcttacctattagctccatcctggctatatgttagtagtgtctgggaaggcttaaaaattacaaagcctgggccgggcgctgtggctcatgcctgtaattccagcactttgggaggctgagccgggtggataacaaggtcaggagattgagaccatcctggctaacacagtgaaaccctgtctctactaaaaatacaaaaaattagctgggtgtggtggcaggcgcctgtagtcccagctactcaggaggctgaggcaggagaattgtttgaacctgggaggcagagcctgcagtgagctgagatcatgccgctgcactccagtctgggcaacagagtgagacttgtctcaaaaaaaaaaaaaaaaaaaaaaaaaaagtttacaaagcctggatccctctccagaccaattatgttggaatttgtgggtggagtctgagcatcagttgttcttttaaaaaattccccagttattccagcgtgcagccacatttcccattagatttctcttgacttcttgtggcatttacgcctttctttttcggtattatgattatttttcaggtcttatctcctgtcttgggctttatattccttggggtagggaccttgcctttttcatttctgtatctttcatgaacacatgaattggtcatcaggaagagattctcagccacacataggttgtgtcctgggtctcaggttcacatgttaatgctacagtctttgttctccacaaggtcagaggttgcttgcgatgaaggatgtgggtaactccacagtgcagctggtagatggaggtcaccctgtttggtatgtttttaggtgtagccttggaactaagaattctgtgtgtggggtggaggggcagggatatgtagggagagagatctaattaggatggaggaattatacaaggaagtagtgataaaggaaggaagaaacttcttttttttcttttttttgagatggagtctggctctgtcatccagggtagagtgcaatagcatgatctcggctcactgcaacctgtgcctcccaggttcaagtgattctcctgcctcagcctccagagtagctgggattacaggcgcccaccaccacacccagtgaatttttgtatttttagtagagacagaatttcaccatgttggccaggctggtctcgaactcctgacctcaagtgatacacccacgttggcctcccaaagtgctgggattacaggcatgagccaccgcactcggtcagaaacatcttctctttagaagaagtttgaacttatctaataggccagagtaggccactgtagatttttgaataggggagtgtactaggagggtaatgaggcagtcatatgcaagaaagatttcggagagactggagacaagaagtcaagcaagactttgagtgttgttgagggtctgggtcagttaggtttatgggaatggtgagaacagcataactgacagttgttaaaaaaggatcaagaggctttcacaatgtattgaatctggaaacaaatgagcaggggctgtggaaacttagggggtgtcactgggagaaatgagtgagctgtgtgggagagcttgtttaaatgggtaacttcagacagtatttggatgtgggtgtcatgagttctggaagtagttggggctagagatataaattaagagccatctccagagaggtcactaagctgatgaaagagggtagatggagggagacaagaagggtctgagtactaaatctggtgtgggggagcagtcgtaagtgggaaatggagggaggagagctttccagaagggaaaagttgtctgtcatcttagatattgtaaaaggaaaaagtgtgaggtccctaaaaatgcctttggatttggccaagacatggatactgattttgtgctgttcccagcgatcttgggtagggaggcactgcagagggccaggaaaaattaggtgatgaggaaaggcaaagacaacacatgtgtttcaattgcttggaagtgaaggaaatgaggttatagcttagtacttagcagaattaataaatgaaggctattcgggttagaagagatccgaccctcctagagggcagaataaaggaattgggaaccaggaagagttagaaggtctagagggatttctatgtgaatgaacctgtggagacccttgtatagctacatctgattcactggagccgctggtgtgggaagtgttgttggcccctaatgaagaggctgggaggtcttttactcatgagatcatcttccctcccagaggaagataggcacttcctcccaggcaagttggagctgtggtctgttgctcccagatatactcactttgttagcaggtatgcaaatgaatttagctaattctctgatcactagatcaaatatctgtaggcttaaaaatagtttcacggccgggcgcagtggctcacgcctgtaattccagcactttgggaggccaaggcgggcggactgcctgaggtcaggagtttgagaccagtctggccaatataatgaaaccccgtctctactaaaaatacaaaaaaattagctgggcatggtggcatgcacctgtaatcccagctacttggggaggctggggcaggggaattgcttgaaccagggaagtggaggttgcagtgagcggagattgcgccactgcactccagcctgggcgacacagtgagactctgtctcaaaaaaaaaaaaaaaagagttttactctgactccccattgaacaatttgtttattctgcctgtagagaaaaacattgtccaaggtagtatcaaccatgaggcagcatgtcgatgtctgatatattatttttattataaaaacatagaataattttcatacataattcagacatgatcttagccaggaaaaattaaataacacagcacagcatggatgagggaaagtatgcacagtccgtgtcagggttagaaaaccctgaaagaggtacctgagtatagagaactccaagctaatcctcctggagaaagcctcttaggcctaacatgagatcaggtaagcaatatagaataaaacctttctcttagccccaaagagattccatctgtgtagaagactgggtgagaagtacatttgcctgtcttcctcctgtccttcctttttattataagatacatttatagaccccatagaagaaaagataaatttcagaggctgttaaaagaggctaggcctaagttataatcctcctcctcacagccccatttccccaaggggcattagcaccagtgcagctttctagctgtaaacaatgccaccagcatgagtgatagtgtccctgtagggtgctcccacttctcaaggaccaaatacaccttagcagaggccaaggtttcctgacaaagtgaatgggggcaaacagaaaatgcacaggtgcaaacatggaatagaatggtagttgatgattggtctgaggtgcctagaaactgagttaaatctagctctagccatgaatgaagaaaaccttttcttattttctatttggagcctctgacaaaaaaaatcttgagaggctcctgaccaagggacctgagggatttcggtggtttctttcacctaaggcaatcggattggctgacatagctaagctaagtaaaaataacccttttcacataaataagcagttacaaaaattaaaatggtggaatgtctcagagaaaaggagaaaaatcccaataccccaaattgtgtattctttaacaataatttaaataatcgctgaagggcagctctctgattcctttcccaagttcctagcagattgtgtttatcagaagctggttccctcctgaagctataacccctccctctcagcactgccttgaacagagcccataaagatattaaaacatatatgtgcttttgcattttccatcaggaattgccttggattttggcaagtgattttcctagttgcttctagtgggttctctgaagacaggcttgccagaaggattaggtggtattctagctaagcaccaaggtgcttagaccctgatcctacaggtagacaaccctgacagtggacaaaggtgtggcatttcactattggttatatatttgattttcttgtgtttggtgagttcacacaaggctttggagaaataggagaaggcattactgcctttactttctctctctcttgtttcctggcacatgtacttaatggaaaaggacataacctcaaggctatggcaaatccgaattagagtgataggacaggactgggggtgggaaggaatgagtgctctgaacaggcaagtttaaaacaagtccaggttgggaaaaggggaagggaggggaagttctggtccctctttcccaaagtcagctttgccaaatttcaatgacaagaaggttgggtttcctacagactcccaatgtactttcatctattgacactgagagaggggcagtgaccaggcagcctggagatgcctattaggaaggaagagtaggagaaagttgtttctgtccccacccctctacccctacaggggaaaggaatctcctagtgatgagggtgagagacttgaaatacatcagcactgcagtgagcaggacaggtttcattactgcttttttacttctgaataaattatttctgtggctgttagggatggggaggctgaagttggttgtgtgggttgctgggcttcaaagttcagggtagaataagtaacttcattcatctgaaaagcacaaataatgatcagttaagtcagtgacacagggcagggcctcaccttgcctggtgtgattcagcaccacaagctgttaccattttgaaattttagctctggagaagggcttttgttgttacccattctctgcttgctgacctcctgatgaatgatcattagaagagagaaattatggtatatatgcaatgggataggataatgcagcaatgagaaccagcaaaccacaaatacatacaatatggatgagtctcacaaagcaatgttgaagaagccacatataaggatatgttttatttctcctttagataggaacaaaaccaagcaatactaatctggagcattagaagtcaggatagtggttactcctctttggagggaagtgactggtagagttttttttttttgcgacggagtctcgctctgtcgcccaggctggagtgcaatggcacgatctcggctcactgcaagctctgcctcccgggttcaagcgatgctcctgtctcagcctcccaagtagctgggattacaggcatccactaccacgcccggctaattttttgtatttttagtagaacaaggtttcactatgttggccaggctggtttagaactcctgacttctagtgatccacctgccttggcctcccagagtgctgggattacaggtgtgagccactgcacctggctggaagggtctctttttaaggggaggtcatgtagtatttcatgatttgggtgctgcttacctgggtgtgttcaacttgtgaaagttcatacattgtgaaagtataattatgatttagcacttttcagtatgtatgtttgctctattgaaaaggtaaaatgaaaacttcttttttttttgagacagagtttccctctgtcgcccaggctggagcgcaatggcgcaatcttggctcactgcaaactccacctcctgggttcacgccattctcctgcctcagcctcccaagtagctgggactacaggcgcccgccaccacagctggctaatttttttgtatttttagtagagctggggtttcaccatgttagccagaatggtctcgatctcctgaccttgtgtttcacctgccttggcctcccaaagtgctgggattacaggcatgagccactgtgcctggccataaaatgaaaaattctataaaattattattaaaaaacaggatctcagatctattaaaattgaaattatccttttgacaataagagcaggatcagactgaaggtaggggagtgagaatgattcagtgccttccttttttaggccattgtgctgggtgctctttgtaggttatctcgtttaatcccttcaacttctctttgaagtaggcagaatgcccattttacagatgacaaagctgatgatcaaagaggttaagttacttgacaagggtcacagagctactaagagtcacatccagtattcagacacaggatgggaataattccaaaatgcatgttcttgctgcaaagtagactcatgggagtgattacaaatacgtctttgttgttgcactgaggaacattaacccaaacttgatgttacattgtgtcttcatgaataatcaattctacacagaatcatttccatgagaaaataagcccatgaaaaccggctatgcttaccttgttaggtgggtcattggagtggtcctgagctggagaagcaaaagaagagttagcgatccatggaaatgcaaagctgacttcaggtgattctagctgaaggaggtggcagttggagggtggggagtttaaggatcagttaaggaatttacttccctcagagtgtatggtccagacccagcatgttagtaccagagagggggcaggggcagaaccacaggaggccacaatccacttgtgaagagttctaccagttcacaaggccttgatttttgcccagatgtgtttctcagcaacatgctccagtggcaaggaggggcattgagacttgtagcacccacagcacccacaagataaggaaagtctcaccaagggagagtgcccacatccgtaatagaggcaggaggcggaaggagtaaggctgaggaaatggctcctggaaacatgggatcttcctcaggcctgcctggcctaggcagagtgagcctctctcctcagatgtgtctcaggggactcctgtggctaggaagggtgggaagacctatgccaccttagggttgggaaatagagatcctttctgtgaaaattcagaagggagggagtggtttgggaatccaggattccctgccaggggagggcacgtggtggaacataccagttctcactggggtaagtggctttacttactgtggttggagactgagggtttgtgctctgtgagatcacgctggtcgcttgccctaaataaatatcagaaactgtgactgctattcccaagcacaggatctttgttccgtaagttaggaaggacactgtgagcaggtaattccttagagtccttgatgttcatactgcctttcttctgagggcctcgttcttcagtctaactacaatcccttctagtgtttactcttttcctgtttgctggatgttcacatttcatttcattctttatcagctgcttctgtgcctacttctatccttaaaacctttcccattttgttttccggggtagatacttttttttttttctctatttattgttcaagaggactttggttgtttttgctttctcttaggttctcttcctatgctatttctccctcctcttccaatgtggtcaacagagcacatgacttgctttctcctgctgcttctttcattttttcatttgttttccttcttagaccttgctttccctgactaggggacagaggaacatacttgagtctcttcctctagattagatggggattggaatacccatgtccaagagataatgggagacagggagcacgaagaccagggaagaggaaacctgtgggaattagtgccgagaagcaggagtttagtgggaggagtatgagatccaggcccagagacaggcaaagaattctttccctctcccaagcatggcagtcagccttggaggaaacagaacaagaggaaaggccatcatacctgccggtcttcccgaaatgcagaaaacatgccagggctactgctatcagagcaaccagggccactactccaatcacaatgccagcaatggccccaggtgagaggccattttcttgtggtagagcattatctgtcatggagagaaaagaggagaagaaatgaaagtgaaattattttacaatgggggctgggaaacaactctcagaatgaagtagtttctaattgttccttcaaggaatacagtttcgttgtgggaaggttgctggaaggtgattagctaactatatccttgcaatttttttttttcaatcaccatgtttctttttttcttttcttttttttttttgagacagagtcttgctctgtctctcaggctggagtgcagtagcatgatcttggctcactgcaacctccgcctcccaggttcaagcgattctcctgcctcaggctggactacaggcacgtgccaccacacctggctaatttctgtatttttttagtagagacggggtttcaccatattggtcagactggtcttgaactcctgacctcatgatccgcctgcctcggcctcccaaagtgcttggattataggcgtgagccactgcgcccaaccccagtcaccatgtttctaggttgatgatctctcttctgccaattccaccctggcttttctgcgctcagccatttttaaggctttgaaatatgagaaaggctgattgctattttgtatgtgattagaactttccacctttttcgtggttgcatctttttctcagtgtctcagttgtggcagttggtgcattctgaattcaccacctcttttgcatagagaactggcttcccacaggctcccagcaggggtatgaaagctagcccagttttgtgtgactgttttattctgaagtgtgaatggctggaggactccctgtcagccttgcagaaatgctcttagaactgcactgcaggccgggcgcggtggctgacgcctgtaatcccagaactttgggaggctgaggcgggtggatcacgaggtcaggagttcaagaccagcctggccaagatggtgaaaccctatctctactaaaaatacaaaatttagctgggtgcggtggcaggtgcctataatcccagctacttgagaggctgaggcaggagaatcgcttgaacccggggggcagaggtttcagtgagccgagatcacactactgcactcaagcctgggcaacagagtgagactctgtctcaaaaaacaaacaaacaaaaactgcacttcaatctaaaacttccttcctctctttctcttccacaggaatcagatctgcatcatggtctgaggttcctctcactctcgccttactttccctcacaggcattttccccaataaattatctcgtatgtttaatcccatcttcactgtatctcagtagatggaaactaacataccaggcttgagactttgctttacctccttttttccccctttcccatatttgatcatagccatgtcccagtgggtttcttgtataatgcttctccctccatatatatatatatatatatatataatatataaataataccttttgcatctatttcttcttcttctttttttttttttttttttttgaggcaggttctcactctatcacccaggctggagtgcagtggcacaatcatggctcattgtagcctcttgggatcaagtgatcctcccacctcagtctcctcagtagctgagactataagcacatgccaccacacctggctaatttttttctttcttttttttttttttgagaccgagttttgctcttgttgcctaggctagagtgcaatggcgtgatctcggctcactgcaacctctgcctcccaggttcaagcgattctcctacctcagcctcctgaattgctgggattacaggcatgcgccaccacgcctggctaattttgtatttttagtagagacggggtttctccatcctggtcaggctggtcttgaactcccgacctcaggtgacccgcctgcctcaacctcccaaagtgttgggattacaggcgtgagccaccacgcccacccacctggctaattaaaaaaaaataatttttgtagagatagggttccactatattgcctaggctggtcttggattcctgggctcaagagatcctccagcctcggcctcccaaatgttgggattacaggtgtgagccactgtgtctagcctatttcttgtttatatctgttgcaactatttggggcttaaccctcaccagtcaactcaggctggtgactaatgctatgttagctacttttgtggagtacttcctgtgtgccaggccctgtgctgctaaatgctttacatgtatcttatttgatccataaaatagtgctgtcaggtagacattatttccattttaaacatgaaaaaatggaagcttagagtggtaaaaggcttacctaaagtcagatggctagtgagaggtggatctgagatttgaccctaggactacctgatttcaaggctaatgataatagtagtagtaatagcagctaacatttatgaaacatttcctctgtgtgtggtgttttgctgaaggtttattattacattaaatctttaaaataacactatggggccaggcgtggtggctcacacctgtaatctcagcactttgggaaacagatgggaggattgcttgagcccaggagttcgagtccagcctgggtaacatggtgagattctgtctctctgaaaacaaaaataaaaataaattagccagatgtggtagtatgtactacttaggaggctaaggtgagggaattgcttgagcccaggaggttgaggctgcagtgagctgtgtttgcaccactgcactccagtctgggtgacagagtgacaccctgtctcaaaaacaaaacaaaaaccccaaacccgtgcaatactatggagcaggcattcacagtgcaattttcggttgaggaatccgaggctcagagtagttaagaatcttgtgcaagaaagaaatttataactgtaggccaggtacagtggtgtatgactgtaatcccagcaatttgggaggctgaggcaggtgtatcacttgagctcaggaatttgagaccagctgggcaagatggtgaaaccctgtctctacaaaaaattacaaaaattagccggaggtggtagtgcttgtctgtagtttcagctacccaggaggctgaagcaggaggattgcttgaacccgggaagttgaggctgtggtgagccatgatcagcctcggtgacagagtgagaacctgtctcaaaccgaaaaaaaaaagttgttcttcaaaaaagatcactataattgacaactgttaattagattgactaagaaagaaagaagattcaaattactaaagtcagaaatgaaagtaaaacattactactaattctgcagaaataataaggattataagagtactatgagtaattgaatgccaacaaattggataacctggatgaaatgaacaaattcctagaaacacaaaacctgccatgatagaatcatgaataaatagaaaatctgaatagacctataaccagtaatgaaaatgagtcgataaaagcatttgacaaaattcaacattctttcatgctaaaaaacactgaaactaggaatagaaggaaattctcaacataataaatgctacatgtgaaaacccccagctaccatcatagtcaatggtgaaagattgaaaacttttcctttaagatcaagaacaagacaaggatgcctgcttttgccatttctattcaatgtagtattggaagacctagacagaacaattaggcaagaaaaaaaaagcatctagattggaaagaagtaaaattatacctgtttgcagaatacactaacttatatatagaaaaccctagagattccacaaaaaaactgttagaataataaatttagcaaagtggcaggatacaaaatccacatgcaaaaatcagttgtatttttgtatactaataacaattcaaaggaaaattaagaaaaaaattctatttataagagctttaaaaatacttagaaataaacttaaccaaagaggtgaaagatttgtaccctgaaaatacaaaacattgccaaaagaaattaaataagacataaattgaaaagacaccccattttcatggattagaagacttaatattgttaagatgacagtactacccaaagtgatctacagattcagtgcaatctctatcaaaattccagtaatattttttgcagaaatagaaaaattcattctaaaatttatatagactctgaagggaccatggatagccaaagcaatcttgaaaaagaacaaagttgaagggctcacacttcctggtttcaaaattttttacaaagctatggtaatcatcacacctgtaatcttagcactttgggaggtggaggcgggtggattgcttgagctcaggagtttgagaccagccttggcaacatggtgaaacgccatctctacaaagaaaagcaaaaaaacaaaacaaaacaaaaaaacccaaacaacaacaataaaacaaacaaacaaaatccaaaagctacagtaatcaaaacagtatggtactggcaaaaagaaatagaaaccagtggaataaaatatagagcccagaaagaaatgtttgcatacatagccaaatgttttttgacaagggtgccaagatcattcagtggggaaaggatagtcttttcaacaaatggcattgaagaaactggatatccatgcaaaagaatgaaattgaacctttatgtaacaccatatataaaaattaattcaaaatgcataaaagacctaaatgtaagagctaaaactataaagctcttggaagatagagtgaaaactttggaacattgaatttggcaatgatttcttggctatgacactaaaagcataggcaacgaaagaagaagtagagaaattggacttaatgaaaattaaaagcttttgtgtatcaaagcacattatcacaaaagtgaaaagacttcttatagaatgggagaaaatatttgagaatcatatatctgataagggattaatatccaaaatatataaagaactactgcaactcaaccaaaaatccccaaacaacctaattaaaacatgggcaaaggacttgaataaacatttctccaaagaagataaatggcaaataagcacatgaaaagatgctaaatattgctaatcattagggaagtgcaaatcaaaactccaatgatataccaccttataaccattaggatggccattataaaaaacaaaacaaaaccagaaagcaacaaatgtttttgaagatgtagagaaattggaactctagtgcattgctggtgggaatgtgaaatggtatagccactgtggaaaatggtatgatggttcttcaaaattaaacaggattaccatttgatccagcaattccacttctgagtatctatttaaaagaactgaaagcagggatttgaacagatatttgtatacccatgtttgtaatagcattattcataatagccaaaaggtggaagcaacctaactgtccatagatggatgagtggataagcaaaatgtgatgtatctatctacacagcataatattattcagtctccaaaaggaatgaaattctgatacattctacaacatagatggagcttgaagacattgtgctaaatgaagtaagccagacacaaaaggacaaatattgcatgcttccatctgtatgagaggtacttagaatagttaaatacggggtgggcagagtggctcattcctgtaatcccagcactttgggaggccgaggctgagaccaggagattgagaccagcctgggcaacacagtgaaaccccaactctacaaaaaaacttaaaaacttagccaggcatggtggtgcaacctgtagtcccagctactctggaggctgaggtggcaggattgcttgaacccaggggattgaggcgggagtgagctttgatcacaccacagcactccagcctgggtgacagagtgagaccctgtctcaaaacaacaaaacaaacaaaaaaacccaaccaaccaaaaaaaaccaactaagtatatgtatatttgattcagagcctgagctctttttttttttttttttttgagacagagtcttgctctgttgcctagactggagtgcagtggcaccatctcggctcactgaaagctccgcctcccaggttcacgccattctcccgcctcagcctcccgagtagctgggactacaggcgcccgccaccatgcccggctaatttttttttgtatttttagtagacacggggtttcaccatattagccaggatggtctcgatctcctgccctcgtgatccgcccgccttggcctcccaaactgctgggattacaggcgtgagccactgtgcccggcctgagctgagctcttaaccactttgcaattctgtttgctataatggtctcttcattgatattctgcctcctgtgagttttatccattttgcacaccattgacagagtaatcctagagggacatataggaaggggtgaggagtcacttacagtttacgttcagcatgatggggtcgctttggttcttactgattgggttgaagacctcacaccaatacgtcccagcatcctccctcttgacagggtttatgctgagggtggtgttgccctgggacagcttcatcctctccgaggacgggagactctggtttttgaagaaccaacggatggagattccagtgtcatttgtggagcaggtcaggttcacagagtccttatctcctgtgactgtggtcttgctggctttgatttggggctttgctactactggacttagctctgtggacaagcagagtatctgagataacctactgagaatagggttggggcctggggcctagggctatgctcctttccctgagattttagccagctctcaggtcccacagtgagctgtgcaaaggtcaccaaccaggggatagccctgaccctctgcagaaggtcgagtgtctttgttcaggtgatgaattgtaaggagagggctgcacctccctcctgaccccagatcgtctcagagtgaccctctggatatctctatatctccacttggaatcttcttctcagcgcacagaccgagcaacctcatcatcaggtagaatgtttttcccactgactttttttttttttttttcagacggagtctcgctctgtcacccaggccggaatgcagtggcatgatctcagctcactgcaagctctgcctcccgggttcaagccattctcctgcctcagcctcccgagtagctgggactaaaggcatgtgccaccatgcccagctaattttttgtatttttagtagagacggggtttcaccatgttagccaggatggtcttgatctcctgacctcatgatccacccgcctcagcctcccaaagtgctgggattacaggcgtgagccactgtgcctggcctcccactgaccctttcctggagctgtgatcaggcatccttcctgtgactgtcactttacatacaaaagggaaggtagtgttttttttcattaaataattttttagggaatgatgatgccccatccagtcttcatgaccttactatctggagttccaatccgaaggatttcccactgtaaagaggagttttacttcctggtctgtggatagaatatcacggtgaaggagattcctagagtaggcacagtgttaacaaaaggctgatattcttaccttctctacaaatacacgctgtttggcattgcccattctctccaatgcagagcccctgtggctgaatctcccgatttctccaagtgtgggtcactcgctgtgctctgtgctatcccatgtgctgtgcccacagcctcatacagctggtgacttcagagccaggacaagctcagggaggcagcctgacccaggggaggctcaggtgttgactgcctttatttatttatttatttagtttttgagacagagtctctctgtgttgtccaggctggagtgcagtggtgccatctcggctcattgcaacctctgcctcccaggttcaagtgattcttgtgcctcagcctccctagtggcatgcctagtggcatgtgcaaccatgcctggctaaatttttttttttgtatttttagtagagatggagttttgccatgttggtcaggctggtctcgaactcctgacctcaggtgatcctctcacctcggccttccaaagtactgggatcacaggcatgaaccacagcgcccagccattgactgccatcttgatttagctggattcatgacaggccacctggacaccttctgcacacacctgcgtcctaccccacatggggtcagggcagagccaatcaccgggcaagccgggagtagagcagggagcagagtctgagctgctcatccctgatgaagggcatttccttctctcatttagggaaaactattgtgagtctgttttaaaacctcacatattccttatatctcatggaataggtaaaagaaggccaagaagttacagaaagggacatgttagtgacagaagcaaattgaccttgaggaccctttctgcttccccctctgtgaagcccctcctgctacacggggctttctggggctgagagaaccccctccccacattccaggctggacctaaggtcagctgtgagaaatcagaaaaacaaagggaagagagtctgcacagatgaattgagagggttcaggggagaatttggacttgtttgtgcctgttggatacaggctgcaaaagaaaatttcttctctgctcctatttgaaaaccagaaagcttgtaccccagatcttagtgttgatgctccaggaattacttaccagtgactatgatcgtcttgactgtggtcctgttgcagccagtgactgagttattggcgtggcaggtataggatccactattattcacagtgatgttagggataaagagctcttgtgtgctttgctggaatgttccattgataagccaggagtactgtgcaggtgggttagaggctgcatagcaggagaggctgaggtttgcccctggacggtaataggtgtctgaaggggaaatggtgggggtgtccgggccatctggagcaaagagaataaagccacaggtgatgtcatcagagggaaggggaagctgctggtctggagaagggccacagtgttcctctctactaagtcacaaccctgaagtcctaaccaaacctccattgtgtccactgagtctgggtctgagacattcacctgtttctcccatcacaggctgtggaccctgagcctcccaggacaggagcagcctctcccctcctattcttggttcaggctggggctgcccaggtttgcctggggaaaggaagtcatggccagcctgggtgtccagggttaagggtctgcgtccttagacctgagagggactgagaggcctggcctctggctgcgtggatttgggctggcagcctgggccacagaggaacagaagatactcacaggtgacattcaaggtgactgggtcactgcggttcgcactcactgggttctgtatttcacactcatagggtcctgtgtcattccttgtgacactgagtagagtgagggtcctgttgccattggacagctgcagcctgggactgaccgggaggctctgattgtttatccaccacaggtaggttgtgtcctgagtctcaggttcacaggtgaaggccacagcatccttgtcctccacagggttggagttgttgctggagatggagggcttgggcagctccgctatgcagaaaacagagagaagattgccctgtgtggcacctttgattcctccacaggcatttttcttttcttatttatttattttttttggagatggagcctcgctctgtcacccaggctggagtgcaatggcacgatctcggctcactgcaacctccacctcctggattcaagcaattctcctgcctcagcttcctgagtagctgggattacaggcacatgccaccatgcctgacggggtttcaccgtgttgcccaggctggtctcaaactcctgagctctggcaatccgcccgattcggcctctcaaagtgctgggattacaggcctgagccaccgtgcctggctgggcatttttctttctttctttttttttttgagacagagtctcgctttgttgctgaggctggggtgcagtggcacgatcttggctcactgcaacctcttcctcccgggttcaagcgattctcctgcctcagcctcctgagtagctgggactacaggtgcatgccaccatgcccggctagttttttgtattttagccaggatggtcactgttagccaggatggtctcgacctcctgacctcgtgatctgcccgcctcggcctcccaaagtgctgggattccgtccgggcatttttcaatcagagttggcatctccccacctctcagccaacccaagtccctaaaagcccatggcaagtgtgtgtttcacaagacagatgtgcaatgatctgagggctcagagaccgtgaggccgcctgctctgtgtgagagaagcacagactttctcaagtgtgaactgagcagcagtgttgggtcgtggacagaccgaggactgggagtcacagccccaggcacttctggtccttccctgactggctgatgcctgcctgacccacctgtgggtcctcacctggaacatacaggtgctgggtcccttccagcttcacagtcctactttgccccactaggtgtgttttctctgcagcttccctgtctgaggacatcctagagatgggtgatgatgggacttcctattgtccttaaaccctgaggatactgagcagcctggcctgggactgtatgtttcagcagaaataacaggggacaccaggggcaagcctgaaggtagctcagtcgtcaggcagcagaaccacaaggtggggcagtttttcccaggtgtttgatgatgactgacttgagccagtgaccccctaaagatagagcagagtccaaggaatgatctagaaaagagtgagggtgacaggcaggggctgcctggatttaacagcatatctacgttccttgtctttggtctttaatgtcccttttccccctgaaaagagcagatgatgacactgtggatcttttctgaaatatgtgggttttttgcaaatgcagaataaccagctagtggaacggaaggagcatgaacttgctgaaagcctgaccctcatggaccgtgtgtgtttggtagatctgggatataaatttgagaagttaaattattccatttgtgaaaattgttattaatactctggatctaacaccaattaataagaggaatattctctagagagcgtgataaactcttaaaccaagctctgaagtccagtaggatcatgttatgatcaaagaaagatgctgaagtcagtttgaaatcagtgactccctgggtagaagggactcatgggtcctgttaggaagacagaacttgtcagaaaggatatctgagagttctcaattgcattaagagagaaacgatgccatatgaggagaagtgatgtatgttatgttagtaaatttagaaagagttctatgttacaaattcctgtggaaattcaggtaaaaagaggaacccaaaacagtcatgtgaaatgctttcttccttttctctcaacctcaggaaacacaactagagtttgaccaaattcatccaaattgggcagagtctaagtgagacaccagtggctaatgcatctccctgtctgagagatcccaccttatgacaatggtgtcatcatgaggacacaggtgtaggtggaatgggcagcaaacccatcagacagcacctgcctggctagctctacctggggaaggtcccaggaaccactagaggatgtgagcccacagcagaacagggatggagttaggagtcaaatgggtgaaatgagcccatgggctttggggactgcagacctgtccttctgcctctgatcccctggtgagtcagtatagagagtgtatggaggagtcgctcgtccctgtcccctggcctgttccacatgtcagcctcactgagggacgtggggacagtggcttatgatggacctggcaggggtggctgctctgggctcatttctgtgcctttcctattgcctgggaggtgggcctggccacagtgtgagcgggaagggaacaggacagtcaaccttgttagacggagtgtctgggaaaggcctaagggtggaggaaactgtgcagttcagctgggataaaaggagaggaaaatgaggacatggaggagcagagagagtcagagatgcccatgacagtgagcagtgggggctaagtgaccttagagaccccagcaaccaggagcctctggtgtcccagaaccaagaccagggagccctgaaaaccttcccacagccgagcagccccagagtcacatgaaatatggtacttggggtggctttaggggtagatggtcaggggatggaacatgggtctcagtctctggagggatggggagcaggtatggcaagaacctcccaggattctgcaaccagatccagtctctaaagaggttatggatcattcaatcattcattcattcgtgagagaactactgagtgtgtgtttcatattgggccctggctggtgcagggtgtgagtgaggagagaaagcaaagtcctttcctttatcctcctgtgggagtgacaccaacacatcaggaaacacaggatttcaagtccagggagcagaggtgtgggtctgaggggataggcctgaacattttttttttttttttttgagatagagtctcactctgtctcccaggctggagcacagtgacatgatcttggctcactgcaacctctgcctcctgggttcaagcgattctaccacctcagcatcccaagtagctgggattagaggcacgcaccaccatgcccgactaattttttttgtatttttagtagagatggggtttcaccatgttggccaggctggtcttgaactcctgacctcaagtgatccgcccaccttggcatcccaaagtgctgggattacaggtgtgagccaccacacctgacccaggcctgaacatttctgacactgactctaattgttgaataagttccagaataaaacttggttaattctccatttgatctcactccccagaccaggatctcccctctgggctgcagatgcctaagaagaaaggaactgaaccaactctggtattggggtccacagatgccaaataaggcccctggagtagaggagaggttaagactgtggctgaagacaaatctcctgtaactgatcttccagttacggtctgtgtgaccttgatatagtgactgtatttattgccatgtggctcagtttcccctcagtgaaatagtataaatggttaatggttttggcttatcttgtggtctgtgaattaaccttaaaatatttataattatttgacctcagctctgcataggggagctgcccaaataaacaatcttattttattttatttttttgagatggagtctcgctctgtcacccaggctagggtgcagtggtgtgatcttggctcactgcaacctctgcctcccaggttcaagcaattctcctgcctcagcctcctgagtagctgggattacaggcacgcaccaccatgcccggctaatttttttgtatttttagtagagacggcatttcaccatgttggtcaggctggtcttgaactcctgacctcatagtccatccacctcggcctcccaaagtactgggattacaggcgtgagccaccgctcccggccgcagcatctattgttgttggattccctgagagtgcctctcagcctgatccctggtggacaaggagctttcaggagcatcctgtctcctctgttcctcctcctggggatggtaaacttcctatggcatctcctaagcccccagggcagttggctgatggcctggggagcttgtccatctgtcctctccaggctgagactaaggtgaaggatgaggctccatccttgcccaaatgaggctctagtgcctgaaccctggctggttaccagctccaggagccacagccctcggatagctcaaattcttgttcctagtcagccctgcccaggaggccacaatctagccctggcccaggctcctcagggtcaccaggagttgagaaccttgggatagtgttttggagcaggggattcccagggctgagcttgtctgtgaggatcccagaaggcccttcaggccagaccctgactgagtcctactgggtctttcttagggacatgttcaccaggagggtcccggggggctagattgagactggtctcccctcgataagttacccacatcagattgtccttcctctgaagcaaatgtctgcaggatcaggactccagagtaagacattcggtattttgatgtctgtcccatagtgtgtcctgcactagatgctcaaaccttaacatggggtataatgcagaggaggacacaggcacagcccaggcctgacaatcccatgtgtgggaagtagaactaaccccccaacacccagaggtcatggggaaatactcacggtatacatggaactgtccagttgcttcttcattcacaagatctgactttatgacttgtagggtgtagaatcctgtgtcattctgggtgacgttctggatcagcagggatgcattggggtatattgtctctcgaccgctgtttgcgggccctggggtagcttgttgagttcctattgcatatcctacaatttgacggttgccatccactctttcccctttgtaccagctgtagccaaaaagttgctggggcagattgtggacaaggagaagaacctccttcccctctgcaacattgaatggcatggattcagtagtgagctgggcagtggtgggcgggttccagaaggttagaagtgaggctaggagagaggagagagcatcagtcaatattgggacctatgcattagggtagaaaaatggggccttgggtcctgagcaggtgtcttcacccctccaccttggagtgtgtgtgtgtgtgtgtgtgtgtgtgtgtgtgtgtgtgtgtgtcctactgggtcaaggtcagcagtgtgactcccattcccttagtgcctctgaccttgtcatttctctggaatgcccttccccagggatccgcatggctccctccccactgccctcagatcttgatcacatcagggtgctcttgggagatcctttccctgacacctcccctagagaccctgggtattccctttctgacctttttctgctctgttccctccagggctcttgtcaacacctgacctcacattctagatctctttgcttgtctgtcttccccacccatgagagcgtgagctccgtgagggcagggatttgtgtgatgttggttgcaccccagtgcctgggataggctgcagactcctgtggatgagttagtgagcattcccagggctcttcatgtcctggggtttatttgccaatatctgaggttggtggctcagggctctgtttaatgccccttttaaaatgttttccttaattgtcacgctgacttaaattgtgattattgtcagcagtttttgaaatttattgctcattgatgattcagttggaaaaggtaaaaaatgggagattgtttattcactaacagtttcagatcactgagactttccttttatgatctctatccctttcatgtcctctctcctatttggctccaagagaagccctctgtcccctcttagagctccatcctccccagaggaccctagccattctctgtgcgccctctttccgccccttcccagggtgtcctcccctcacctgtgagcagaagcccctgccagggtacacgcactctgtgaagtggggctgagaggtgccccatggtgtctcctgctggccctgtcttcacctgtggaggagagcttgggctccaggaacgcttcgagcacggctgctctgtcacctctgctgttttccactctctgtgctgagcctcctccctggggcccagagctttgtctgatcatgtgtgctggggcggggtttgtccaggaagctctgtttcctctcctctcattcctacctttgtccttactttctctttcctttctgtctacattttggtttcccagaccacactttgagaatcaaggctgatgagacctctgtccccatcaggggaggaggatcccccctctccagcactgacctctattgtgtcctggctatgggtctgtcagcagcacacagagaaccctggcatatccaaatgtggtaattattttctttgcaacacagtgagctgccaggtctccccatgctcttcagtgtgctgggaaggtaggaagacacccagcaggaaggtgacagaggtggctctgggggatggaaaggggctcactgggggatgactggggagggaccagccctctgtctctagtgtcaccagcctggcctctaacccagggacagagacccaagtccaggggtctcaggtggagctgcagctcccggatatggagggggaggtgtcctgtgtgtcctgggaagagaggactgtgatagagggaggtgggtggctctgggctctactgtccttggggaagacttcagggggaccctccctcccttgagctgaggctcaaggcctgtccatgttctccctgaccatcctgggtggtctctgtcctctgcgaggctgattgtcctgtggtcaccgcaccttccccacaggtggtgccaggagggaatggggagctgcacagggacccctcacagaacagggtcctcagaggacccaggaagggacagagcaggtacatgggagggcctggaagggtgttttggagcaagggatggaaagtgggctctaccttcacctccttagcaaagccaggttcatgaccaggggaatgtttcctgagtgttgtctgtgtgcaatgtctccccctggagggcaagacaaggcctgcagccttgtcaagggctgccccagggatgctgaccagggtctacatgatgtgagctggccctgacccctgggcagatgtgggctctgacctccaggcttcaaggtcaagtcaccccaggtcctgttcactgcgggtccccaggctgcccagctccatgcggtgcaggatgagcccagggagaggacgtgagttgtccagaggacttctgtcaagattggagagaactgtccaccagggggatgggctgccttagaaggagccatctgtcccagaggtttgaaaaacaaaagcaaaaacaaaacaaaacaaaaaaacaaaggcccagtgaggtgcctttgggggcttgagaatgaaatcctgtcacatgtggcaacatgaatggaagtgggctaggaacagaaagttaaacatcacatgttcttactaatatgtggaacctaaaaacagttgatctcatggaaggaaaaagtagaacagagcataccagaggctgggaagggtagaggaagggagggacagggaaagatgtgttaaaggatataaaattacagctagataggccgggcacagtggctcatgcctgtaatcccagcactttgggaggccgaggcgggtggatcatgaggtcaagagattgagaccatcctggccaacatggtgaaaccccgtctctactaaaaatacaaaaaattagccaggtgtggtcgtgggcacctgtagtcccagctacttggaggctgaggcaggagaatcactggaacccgggaggcagaggttgcaatgagccaagattgcaccattgcacttcagtgtggcgacagagtgagactccatcttaaaaaaaaataaggccaggcgcggtggctcacgcctgtaatcccagcactttgggaggccgaggcgggtggatcatgaggtcaggagatcgagaccatcctggctaacaaggtgaaaccccgtctctactaaaaatacaaaaaattagccgggcgcggtggcgggcgcctgtagtcccagctactcgggaggctgaggcaggagaatggcgtgaacctgggaagcggagcttgcagtgagccgagattgcgccactgcagtccgcagtccggcctgggcgacagagcgagactccgtctcaaaaaaaaaaaaaaaaaaaaatacagctagataggaggaggaataagttctaatgttctataccactgtaggatgactacagatttttttttttttttgagacagggtctggagtacactgcagcctcaacctcctgcgatcaggtgatcttcctgcctcagtctcccatgtagctggaactataggtgcacgccaccacgcctggctaattttttgttttatttttcaatttttttttaaataaagagacagggtatcactatgttgcccaggctggccttgaactcctaagctcaagtgatcctccgcctaggcctcccaaagttctaggattacagccaccatgcccagccaagtgttttgatttttttgtagagactgatcttattatgttggtcaggctggtctcgagctcctgggctcaagcaatcctcccgtctcggccttccaaagtgctaagattataggtgtgacccactgcaaccggcctgactatagttaacaataatatatagttccaagtagctagaaaggggatattgaatgttcctaacacaaagaaatgctaaatgtttgagatgatggatatgctaatcaccctgaccttatcactgtaccttatatgtatcacatcgctatggacccataaatatgtacaattattaggtgtcaattaaaaaatacaattaaaaaagtcatttagagctaaatcatgatgtgaaatgttgttttcttacctctcatctcatgacaacacttggcaatggcaaaacatcctcaggagttgtggctgtgtgctttactgcacagaccagtttgtttgtgagaatgtgtcacctaatgcgagtgaacctacatgagatcatcacccttcctgggggacctcagagaagaactgagaaccgctggctcaggtgtgtggaggaggttgcaggtgagtcacttgctggaaggaaggtctgtgggccagcttgaggaggaatccatttgtagaggccactggatggggccacctgggcctgggtgaagagggcctgagggcacaggacagggggagagagaaggtggtgcacatcgtcatgcaggcaagtgctttaagtgtctcttcattcattcatggcaggcaactcacactttaacatagcaactcagcaaataaaatgaggatattgactgggcgcggtggctcatgcctgtaatcccagcactttgggaggctgaggtgggtggatcacctgaggtcaggagttcaagaccagcctggccaacatggtgaaaccccgtctctactaaaaatacaaagattagctgggcgtggtggtggacacctgtaatcccatctactctggaggctgaggcaggagaatcgcttgaacccaggaggcggaggttgcagtgaaccaagactgcgccattgcattccagcctgggtgactagagcgaaactctgtcttaaaaaaaagaaaaaaaaatattttttctacttagttcaagttcctaaaaaggtctccagattgccagatttccctggaagcaggtcagggaatggtccccattaagaactattgaaatacattaacaaaaaataaagacagatagaatagctgaaacagtcttgaaaaagaaaactggaggactcacatttctttctttcttctttttttttttgagatggagtttcactcttgttgcccaggctggagtgcaatggcacgatctcagctcaccgcaacctccgcctcccgggttcaagcggttctcctgcctcagctcccgagtagctggaattacagacatgcaccaacatgcccggctaattttttgtatttttagtagagacggggtttcttcatgttagtcaggctgatctcgaactcccgacctcaggtgatctgcctgcctcagcctcccaaagttctgggattacaggcgtgagccaccgcgcctggccaggactcacatttccttatccgaaaacttactatatggtgggtacagtgtgccttgctccagtgacgaatgcactgaaggccttgactttaccacaatgcaatatatcagaatagcaaaattggacttgtaccctatgattatgcacattttttaaaaaagaaaatttactacaaagttactgtaatctgaagagtgtggaactggcataaagatacacttacaccagtggattagatttgacagtctggaagtaaaccctcacatttacagtcagttgatctttgacaagggtgctgtggttttttaggtgtcaatttgcctggattaagagacaccctcatagctggtaaagccttgtatctgggtatgactgtcagggtgtttcccgaagagactggcattggagtcagtgaactcagtaaggaagacctgccctcactcactgtgggtgggcaccatccacttggctgagggcctggatagagcacaaaggcagagggatggtgaattctctctttctctctcctggagctgggacacccttttccttttgtctttggacattagaactccaggttgtttggcctttggccatggactgagggtacaccatggcttctttggtcagaactgagccatgctgccagcttccctggttttccagcatgtaactggctaatcatgggacttctcagcctccgtattcacacaagccaattcctctaacaaatcccctcatatatttagatctatttctatatctacaactatatctttatcccgttttctctgtctctctgaggaccccgactagtacaggtgccaagttaattgaatggaggaagaataatcttttcaaataatgatgctgggacaactggataaccacctgcaaagaaatgaaattttggaactctatttctcaccatattcaaaaattaaaacagatcaatgagttaagtataagagctaaaatcataagaaactctcagaagaaaacataaggataagtctttatcacctcagatgtggcaatggactttttagatatgacacaaaaacatgaacaacaaaaggaaaaataaactggactttatcaagatgaaagccttttgtgcatcaaaggacattatcaagaaagtgaaaagatcacccaccgaatgggagaaaaaatttgcagaccattatatgaataaggttttatgtccagaaaatataaagaactgctacaactcaataataacaaaaacccaaaaacctgattaaaaatgggcaaaggggctggatgcggtggctcacgcctgtaatcccagcactttgggaggctgaggcgggcagatcacgaggtcaggagttcaagaccatcctggcttacacggtgaaaccctgtctctactaaaaatacaaaaaattagccgggcgtggtggcaggcgcctgtagtcccagctatttgggaggctgaggcaagagaatggggtgaacccaggaggcggagcttgcagtgagccaagattgtgccactgcactccagcctgggcaacagagtgagactcgatctcaacaacaacaacaaaaatgggcaaaggactcagatggatatttgtctaaatgatatacaaatagtcaataagcacatgaaaagacacttagcatcaatagtcactagtgaaatgcaaatcaaaaccacagtaagacaccacatcacacctataacaattgctacaattcatttaaaatgttaaataagaaatgttggcaatatgtggagaagttggaatcctcatacattgctggtgggaatataaaatggcacagtcactgtgggaaacggtttggcttttccttaaaaagctgatcacagaattatcatatgaaatagcaatttcattgttaggtatatgtccaaagaattgaaaacagggactcaaacagatatttgcatgggaatgttcactgcagcattattcacaataggtaaagtgtagaaacaacccaagtgtccatcaacacatgaatggataaacaaatatggtgatacatacaacagaatgtcaatcagccttaaaatggagtgaagctctgacatatgctgcaacatagatggaccttggaaacattatgctaagtgaaataagccagaaacaaagtgacatatgtgtatgatgccatttatatgaaaaatcaagaataagtaaattcagagacagaaagtagattagagattatcaagatctgggggtagggagcaatggggaattatttttttttaatctttaatttttgtggttacatagtaggtgtatatatatatatatgaggtacatgagacattttagtacaggcatgcactgtataataataatatcatggaaaattgggtatccatcccctcaagcatttatcctttgtgttacaaacaatccaattgcattcttttagttactttaaaatgtataattaaattattgttgactataatccccttgtgctattgaatagtaggtcttattcattctttctatttttttatatccattaactatatacccacctctcccctgtcccgccactacccttcctagtttctgggaaccatccttctcttctttatctccatgagttcaattgttttgatttttagatcccacaaataagtgagaacatgtgatgtttttcttcctgttcctggtttcacttaatatgatgacccttagctccatccatatcgttgcaaatgatagaatctcattttttaatggctgaataatactctattgtgtataagtgccaccttttcttcattcattcatctgttgatggacacttaggttacgtccaaatcttggctgttgtgaacagctctgcaacaaacatgggagtacagatatctctttgatatactgattttctttcttttgggtatatacccagcagtaggattgctggattgtatggtagttctatttttagttttatgaagaatctccaaacagttcttcattgtggttgtactaatttacattcccaccaacagtgtacaagggttccctttactccatatccttgctagcatttttaattgcctgtcttttgaataaaagctattttaactggggcaagataatatctcattgtagttttgatttgcatttctctgatgatcaatgatgttcagcaccttttcatatgcctgtgtgttattcgtatgttttcttttgagaaagtctgttcagatattttgcccttcttttaattggattattagatttttttccatagagttgtttgagctccttatatattctcattattagcatttctcgttctttaagatgcatcgttaggttttaggttatttatttgaagttcttctctttcttttttgatgtaggcacttagggctataaatttccatcttggtactgctttcattgtatcccacaggttttggtatgttgtgttttcattatcatttgttttgagaaattttccaatttccttcttaatttctttgttgacccactggccgtttaggagtatatcgtttaatttccatgtgtttgtatagtttccaaaatacctcttgtttttgatttctagttttattccattgtagtcagggaagatacttgatattacttcaatttttttgaatgttttaagacttgttttgtgacctaatatatagcctatttttgagaatgatccatgtactgaggagaagaatgtgtattttgcagccattgaatgaaatgttctatagttccatttgttctatagttcagattaagtctgatgtttctttgttgattttctgtctgggagatctgtctaatgctgaaagtgaggcgttgaagtctccagctattatggtattggggtctatttctctaatatttgatttatatatttgggtgctccagttttgggtgcatatatgtttacaattgttatatcctcttgctgaattgacccttttatcattgtataatgacctcctttgtcccttctaacagtttttgtctttcagtctattttgtctgatataagtatagctactcctactctcttattggtttccgttggcatggaatatctttttccatccctttaatttcagtctatgtgtatctttatggttgaaatgtgtttcttgcaggcaacagataattgggtcttatttttcagccgttcagccatactgtatctttttttggagaatttagtccatttacattcaatgttattactgataagtagggacttactcctgtcattttgttatttgtttttctgtttttatttattgcagtcttctctttcttctttccttccttcctgtcttccttttagtgaaggtgatttcctctggtggtatactttaatttctagctttttattttttgtgcgtctgttgtatggtttttgatttgtggttactatgaggcttgcaaatactatcttaaaaccattattttaaactgatgacaacttaacactgattacataaacaaacaaacatgcaaaaagaaaactaataaaagctctacacttcaacttcgtcaccccactttttaatgttttgttgtttctgtttatgtcgtattgtactgtctgtgtcctgaaaagttaatgtagtcgtgatttttgattggttcatcatttagtctttctacataagagaagtttatacaccacaattacagtgttatactattctgtgtgcttaactattaccagtgagttttgtacctttacgtgatttcttcttcatcattaacatcctttcctttcaggttaaaggattaaatttagcatttctcataggacaggtctggtgttgatgaaatccctcagcttttgcttgggaaggtctttatttctccttcgtgtttgaaggatatttttgcctgatatactattctagggtaaaagttgttttccttcagcactttaaatatgccatacactctctcctggcctgtaaggtttccactgaaaagtctgctgccagatgtattggagctccattgtatgttgtttcttttctcttgctgcttttaggatcctttgatctttgatcttagggagtttgattgttaaacgccttgaggtagtcttctttgtgttaaatctgcttggtgttctataaccttcttgtatttgaatgttgatatctttctctagggttgggaagttctcttatattattcctttgaataaaccttatgtgcctatctttttctctacctcctctttaaggccaataactttttttttttttttcctggagatggagtcttgctctgtcaccaggctggagtgcagtggcacagtctcagctcactgcaagctccgcctcccaggttcacgccattctcctgcctcagcctcctgagtagctgggactacaggcacctgccaccacgcctggctaatttttttgtattttttaatagagacggggtttcaccgtattagccaggatggtctccatctcctgacctcgtgatccacccgcctaggcctcccaaagtgctgggattacaggcgtgagccaccgtgcctggcctaaggccaataactcttagatttgccattttgagcctattttctagatcttatagatatgcttcttttttttttttttttgtctcctctgtgttttcaaatagcctgtcttcaagctcacaaattcttctgcttgatcaattctgctattaagagactctgttgcattcttcaacatgtcaattgcatttttcaactctagaatttctgcttgaatctttttaattattttaatctctttgttaacattttaattttatttattttatagagacaaggtctcattctgttgcccaggctggtctcaaactcctgagttgaagtgatcctctggcctctgtctcccaaagtgttaggattacagacacgagccactgtgcccagcctctttgttaaatttatctgataggattctgaattccttctctgtgtcgtcttgaatttgagtttcctcaaaacaattattttgaattctctgtctgaaaggtcacatatttctctttctccaggattggttcctggtgtcttatttagcttgtttagtgaggtcgtgttttcatggatggtgttgatgcttataggtgtttgttggtgtctggtcactgaaaagttaggtatttattgtagtcttcatgtcatagtctgggcttgtttatgcctgtctttcttgggaaggctttccaggtatttgaaggcacttgggtcccaagcccaagaatgctgtggtttttgcagacttacataggtactgccttggcgatcttggataagatctggaagaattatctggattaccaggtagagactcttgttcttttcccttaatttgtttcaaacaaatggaatctctccgtttgtgcagagccacctggaactgggagtgtggtgatgcaagcactctgtggccaccaccactgggattgtgctgggtcagacctaagcaccgcactgggtcttgcccaaggcccttcccttgagggtggtgaggtctcccaagcctcagatgtgtctagaaatgctgtctgggaggcagggattggagtcaaaaactgtggctgattagccaggcatggttgtgggtgcctgtaatcccagctactcaggaagctgaggcaggagaatcgcttgaacctgggaggcagaggttgcagtgatcagagatcatgccattgcactccagcctaggcgacaagaatgagactccattgcaacaaacaaatgaataaacaaactgtggctaatctggcactcaaacaatgcaaagtccttcctgctcttccttcccctttctccagcaccaccactgttccacaggggattccacccgtcctctgctgatgttcacttaaagcccaggggttcttccatcagcttgtggtgaatgctgccaggcctgggactcactcttcagggcagtgggctcccctctggcccagggaaggtccagaaatgttctccaggaacataggcctggactcggggaccccaagagactgctggttactctatcccactgtggctgagctggtacctgaggcacaagacaaagtcccctttactttttcctctatttttctcaagtagaaggagtctctccccatggctaccacagctgggaatgcactgggtcacccctgaagccagcatgtctcagagcccaaggcccactgcatattacctgggtatcactactggttattcagggcccaggggctctttagtcagcaggtgatgagttctgccaggattgggtcctttccttcaaggcagtgggctcccttttggctcacggtgtgtctagagatgtcatctgggagctagggcctagaataagggcctcatgactctgcccagttccctgtcctgctgtggctgagctggtatccaagatgcaagacaaaatcctctttactcttctctcttctctccttaagcagaaggagggagtcactttcgttgcctctagctgcgttgcctgaggttgggggaggggtggtgaaagcattcccttagccatgccagctggtgtctcccttggttacacgccactctagtccactggctttaagcccagcctaactaggagttgccttttaagtttacctaggactccagagcacatcagcccaccgtggggaggcttgctgaaaaactgaagttccgactgctgggatgggtgatacctgtctggctagggctggtccaagtactgcctctctgtgtgggcactggctgagcccagcatgcctttattctttgctgtgatggggcagcactgaattcaatgtaaggtcctccagtggccgcactcacccttcccaaagtgcagattctctctccatgttgcagggctgctgcgggttggtgggggatgggtgaggggtggtgtggcctctctccggccctcttcagtgccttttttctttctttttgtaagacagagccttgctctgtcgcccaggctggagtgtagtggtgcaatctcagcttactgcagcctctgcctcctgggttcaagtgattctgatgcctcagcctctcgagtagctgggattatgaaagtgcgccaccacacctggctaatttttgtattttttttttttttttttttttgaggcggagtctcactctgttgcccaggctggagtgcagtggtgcaatctcggctcactacaacctccgcctcctgggttcaagcgattcttctgcctcagcctcccgagtagctgggactacagccacgtgccaccatgcccggctaatttttgtatttttaatagagatggggtttcaccatgttgcccagggtggtctcaaattcctgaccttgtgatccacccgcctcagccttccaaagtgctgggattacaggtgtgagccactgcgcccggcctaatttttgtatttttagtagagatggggtctatgtagcccaggctggtctcatgctcctgacctcaagtgatccacctgccttggcctcccacagtgctgggattacaggcatgagccactgcacctggcccaatgcctctttcagcgatatgaagttaaaaccaggtactgtgattgctcccctggttttggttcttgtgacagtgcttttctctgtgcagattaaaatgtagtgttccagtggtgtgggggtgaggggacaaatggtgtaggcgtctattctactgtctggctgtttggggtgatgaaaattttctggaaaaattagtgatgatggtggtttaacattgtgaatatagttaattccacttgtgtatttagagacagggtctcaccatgttgcccagactagactccaactcctggcctcaagcaatcctccctcctcagcctcctgagtagctggggctacaggagccctccatcagggctctgtagtaaattccatttaattgtacagtttaaaatggttaaaagatacattttttgatatgtatattttattacagttttaaataagtatttggtgaaaaaaaccccaccatataaaatacccaccctgggcaaatagtcctcaaactcatgtgcggacccctcatgacattctgtgcagagatccaatgatttagacatgagactgaccagacaactgcagatgcatgaaataaatgtactttcaaagagacagttccgctgggacctgtgggccccgcagaggggaggtcagcagccccctggaaaggccctaggctggggccctctggtggacagtgaggaaattgtagacgaaaaggtcatgccaaactggtttgtttaaaaaaaatcatcgtttgtttttaatgtgtctagacaaaatttcaacactgtcatgttccatatattttctttcgcagtgttctttgattctagctcttctctggtgtgtgtgtgtgtgttttttttttttttgagacggagtctcgctgtcgcccaggttgcagtgtagtggcgcgatctcggctcactgcaggctccgccccccggggttcacgccattctcctgcctcagcctcccgagtagtagctgggactacaggcgcccgccacctcacccggctaattttttgtatttttagtagagacggggtttcaccgtgttagccagcatggtctcgatctcctgacctcgtgatccgcccgcctcggccacccaaagtgctgggattacaggcgtgagccaccgcgcccagcctctctggtgttttaaaacaagcttacactaaactcagatgttcaaagtctgatgccctgccactttcttacttcagtgcatgtttctttttcgagacggagtctcgctctgtcgcccaggctggagtgcagtggttctatctcggctcctgcaacctccgcctcctgggttccagcgattttcctgcctcagcctcctgagtagctgggattacaggtgggtgccaccacacccagctaatttttgtatttttagtagagatggggtttcaccatgttagccagggtggtctcgaactcaggtgatccacctgtctccacctcccaaagttctgggattataggcgtgagccactgcgcccggcctcagtgcacgtttcttataattccttttaaaatctgaccattgtcatgggcatgcatcaagtctgtgaatgcagacctctgggatatgcccagtgggaatactggggactcagggaatagttatcacccaaggtaggatggcatgaggcagtatcaagggacacctgcaggggggtgggggttgtgtcccacagatggtgggagccacagatggtttcatcaggacagaggcacaataaccgcatcttgatggtctcagggcttagactcacctgttgcgtccagaaccaggcattgaccagggttcaaattagtgctccacctgcagagccctgggcagagatggacaacagcctccccctgcaggacagtcagtgcagggctgggtcacctcagcactccacaggcctttgcctgcagtgttctcctggccagggaggaggccaggcccatccctgtcacatcatctaaggggctgtctgccctgagggtctgcagaagagttgaacagagtaaggggcataggaagcagtagagccgtgtctcttcttgagctgtgttaacttttgtcttcttagtccctgaggtcactcccaaatgtgggcatctagacctgaggcaggagggtaggacggggccagcttcttggcatgtgacctgtgttatcacatgggggcctgtgcttagaagggtcctgcacttaatatagtgcccttctgtggctgtgttgaaaccctcttaatcctgtcttgaagaaggatactgcattttcaggttgcactgaatcccccacattatgtggctcttcctgggtcaggagcagggagagggagaggccatgagatgagggggaggctcagggctggatgggacccatgtcccctagggctctgtgctgcccttgtcttaggacctgcagggcggtttggtctcatctgttcactcccagtgtccactgaatggtgcttgtatagcagggactgtcccactatccaggacaagcctatagtgtgtgtgctcactcagtatgtgtgtcaggctggacagaacctcactttatccctgtctgctgtgggatctgcagcaaggatcccctcctgggagtctcggtgtctctgtacctgagtggtgggatgaggagacctcaaagggccatctcagaggggactcaacagtgttggggctggaggaggcctgggctctggggcccgaggatgtcacacacctcttgagtcttttgaaatggtttcatctgttattttgaaaatcatataggtggctgggcatagtggctcacgcctgtaatcccagcactttgggaggccgaggcgggtggatcatgaggtcaggagattgagaccatcctggttaacatggtgaaaccccatctctattaaaattacaaaaaattagccaggtatggtggcaggcgcctgtagtcccagctactcaggaggctgaggcaggagaatggcgtgaactccggaggtggagcttgcagtgagctgagatcacaccactgcactccagcctgggcaacagagggagactccatctcaaaaaaaaacaaaaaacaaacaaaaaaaaaacggtcacataagaaagcacacttattgtaaattccagcaatataagcgcttgtaaaatgatgtgtcagatccctgaccccaccccactccaattccatttccaggatgtaaccactgtttgcagttggtatgaatctttcaataatactttctcatttgtcccactcattgtttatacagccaaacattaatgaattatattattaattggtaatgttgttttatagtgaagcatgtatggtggacacttcctttctcaacacatgtggatttgctccaattgtgtttctttttctgttttagaggttttattttaggttcaggggtacatgtacaggtttattatatacataaactgcatgtcacaggggtttggtgtacagatgattttgttacccaggtattaagcctagtacccaacaggtgttttgtctgatcctctccctcctcccaccctccaccctcaagtaggccccagtgtttgttcttctctttgtgtccatgggttccaatcatttaggtcccacttaaaagtgagaacatgcggctgggcatggtggcttacgcctgtaatcccagcactttgggaggctggggggggggcggggggtggatcacgaggtcaggagttcgagaccagcctgcccagtatggtgaaaccccgtctctactaaaaatgcaaaaatgagaacatgtgatatttggttttctgttcctctgttagtttgctaaggataatggcctccagctccatccatgtttctgcaaaggaaatgacctcattcttttttgtagctgtgtagtattccatggtgtgtacgtaccacattttctttatccagtctaccattgatggacatttatgttgattccatgtctttgctattgtgaatggtgctgcaatgaacattcgtgtgcatgtgtccttatggtagaatgatttatattcctctgggtgtatacccagtaatggggttgcagggtcaaatggtacttttgtttttagctctttgaggaattgccatactgcttttcacaatcgctaaactaatttacattctcaccaacagtgtataaacgttccattttctctctctcttttttcttttttagacagtcttgctttgttgcccaggctggagtgtagtggcacagcctcagctctctgcaaactccacctcctgggttcaagtgattcttgtgcctcagcctcctaagtagctgggactacaggcgtgcaccaccacgcctggctaatttttgtattcttagtagagtcgaggtttcatcctgttgggcaggctgctcttgaactcctggcctcaagtggtcctccctccttggcttcccaaattgctgggattacaggtgtaagccaccgtgcccagcacattcctttttctctgcaacttcagcagcatctgttattttttgactttttaataatagccactctggtgtgaaacggtatcttactgtggttttgatttgcatttctctaataattagtgatgttgagcattttttcatatgcatgttggtccatatgttcaagcttttgaaaagcatctgttgatgttctttgccttttcattgctttccccttatttattttattgcatggctacactgtgatgctttatccactcgcctattggatttgacgctgtgtcccactcttcatgttgacaagacattctgcagtgactatcctcatacacatatcttttccccacgtggagtattaatccaggaactcattcattcagctcttataaagtaccctggccaggctgtgggcaggtcaagggctttaacagagacagggcaggcacagtcctgccttctcagagctcaccgctcagtgggactctcagaagtgggatagtggtcaaagcgtatgcacactgaacacaatgaggccagggctgggtgtgatggctgagttcaaacctgcaattccagagctttgggaggccaaggcaggaggttgcttgaagctaggagttgaaggctgcagtgagctatgatcatgccactgtactcctgcctaggcaacagagcgagactccatctcaaaaacctccacaagacctaaaaaatcatgggccaaagttgttgttgtaagtactgcagtcccatcaggaatatatgaaaatgtccatctccagtatccccacctttcttggaataatgattgaagtagaaagtgcccgtgttcttgtgcctacctctgcccacacaccgtcttcacttacacttagtcatccaccacttaccctttcactaagtgctattgattatgtccatgtggtggaccagatgccaggagccccaagatgtcctgagcagctccctctgctcgtccttccaagagttctggttccacaggtgacccctgtagaacctgtgattaccactgaaggctgacagtgagtggtgggtgttccaggaggggccgtcacctccatgtacagggttggggagggtggaagggagcaagtggctgatggctttggctgtaaggcaggtggacaggctgatgtgggctcctgggaagggatggagaggggaggggaggggaggggaggagagggaaggggagggaagagaagggaatgatacagaggttggaacctgccttcatggaccaagaacagcagggaggccatccaggctgcagctggggagggaagatgtggggagtagtgggtgaagggagaagcagactgtgattgatcttgggggctgggcggtgagcagaggtgtgttacgtgtctgtccctgccattgatatgaggaggggtggggctgtgggtgacacctgggtcagtgggatttcctagtgtctgctgttccccaaagcctctccatatagagggtcagtatagatctgatgctgtgtctgggggaaggggctggtggtccgaggcagcctgtggtgcttactgaccctagggatgaaaggaaagggatgaggaagcctctttacagtgaagcctcaggtatgtgaagccacaggtgtctcacctggtgactgtcatcagacatgtgccttgggtgacagtttcagggttcaggtggttgttattgttatgatgtttgcctgacaaggacccaggtatccagggatcgagagcacaagacccctggtgaggggagggtcagatgagaatgagcaggttcaagtggtcagagtgggagggattcctggagagactgaacctcaactcttcctgtcaggagctgtggctgtgtccaggagagatgacaagggtgacccaggacattgagtgagtcatcgagacattggatatgaggacagggcagagaggaccctggtgactgctcagatgtgggatgtgaggagggctctgactcatgcaagttacaggatcccccaacccctgagcccacaggtgacccttacactggggattctgagtgctgtgtgtgcccagaagggacactggattggctggacctgagtccctgaagggcagggatggtctgtagggccagagtcttctctgtgggtgtgatgtaagcaggaatgagcaagatgggggtgataaggcttggcttggaggagctggtagaggagcccaggggcttgggtcagctccgcttcccaggggctcagctggggctggaggagcaggatgctgtgctcagggtgtgctccaggcagggtgatgtgtgtggttccagggtcaggcaagagggtaaaaaattaatcatgaaaaattcccaccttttgtaggcagagacagtggcctgagtgtcaggggcagaaagatgcatcatgaggcaggagcaggcactcagcctcccagagaccacaccctgggtgcagcactcagccctgcagggagtggcaacagatgtgcctacaaccctaacgtccaggcacctgcaacaaatgtttctccctcattgcatctttctcatgtggaatagaatgggcagtgatatggtttggctgtgtccccacccaaatctcatcttgaattgtaattcccgtaatccctacatgttgtgggagggacctggtgagaggtaattgaatcatgggagtcgttcccccatgctagtctaatgatagtaagttctcatgagatctgatggttttataaagagcctccccctttggttggctctcattcttctcattgatgctgccatttgaaggacatgtttgcttccccttctgccatgactgtaagtttcctgaggccttcccagccatgctgaaggtgagtcaattaaacctatttcctttttagattacccagtctccagcagttctttatagcagcttcggaacggactaatacaggcagcttttcccgcagtctctttccatccatgtgctgcctgctgtgatgcctgggaatggggggggggggggggcgggcactgagtcactgtccagggtgctgatgtccatgaactgttgaagagctaatgagttgtgatctcccagttacttctgctttcatttattcttaacaactgagcatgtcaccaaggaaaagatagagaggtactaggggcatggagagccctctgtctctctctctcaggacctggagggtgctggggacatcactacagtcaggatgacctcatccaggtacccatgtatagtttgtagtgaatgatgatgagaaaatggccttgagaggagtgatgggcagaacaagaacctctcaaagatgtgctcatcctcatccccatatctgtgaataagtctcatggtaaaagacactttacagattaaaggaaagatcatgagatggggagtgataaggcttggctgtgtccccacccaaatctcatcttgaattcctatgtattgtgggaggggcctggcgggaggtaattgaatcatgggggcaagtctttcccatgctgttcttgtgatagtgagtgggtctcagaagatctgataggtttataagggggagtttccctgtacaaactctctttttgcctgctgccatccatgtaagacatgacttgctcctccttcccttctgccatgattttgaggcctccccagccatgtggaactgtaagtccattaaacctctttcttttgtaaattgcccagtctcaggtatgtctttatcagcagcatgaaaacagactaatatagtaaattggtaccaatagagtggggtgctgctgaaaagataccccaaaatgtggaagcaactttggaactgggtaacaggcaggggttggaacagtttggaggggtcagaaaaagacaggaaaatatgggaaagtttggaacctcctagagacttgttgaatagctttgcccaaaatgccgatagcaatatggacaataaagtccagactgaggtggtctcagatggaagtgaggaacttgttaggaactggagcaaaggtgactcttgttttgttttagcaaagagactggtggcattttgccccagccctagagatttgtggaactttgagcttgtaagagatgatttagggtatctgggggaagaaatttctttttctttttttttttttttttttgagacagagtttcactcttattgcctaggctggcatgcaatggtacgatcttggctcactgcaacctccgcctcctgggttcaagtgattctcctgcctcagcctcccgagtagctgggattacaggcatgcaccaccacacctggctaattttgtatttttagtagagatggggtttctccatgttggtcaggctggtcttgaactcctaaccttaggtgatctggccacctcggccacccaaagtgttgggattacaggcatgagccaccacacccagccttctggtggaagaaatttctaagcagtgaagcattcaagaaatgacttgggtgctgttaaaggcattcagttttataagggaagtggagcataaacatttggaaaatttgcagcctgacaatgcagtagaaaagaaaatcccattttctgaggagaaattcaagctggctgcagaaatttgcataagtaatgaggagccaaatgttaatccccaagacaatggggaaaatatcttcagggcacgtcagagttcttcacagcagcccctcccatcacaggcccagaggcttaggaggaaaaagtttcatgggttgggcccaaggtctctgtgttgtgtgcagtgtagagacttggtgccctgcatcccatctgctctagctgtggctgaaaggggccaacatagagcttgggccatgacttcagagggcgcacgccccaagccttggcagcttgcatgtggtgttgagcctatgggtgcacagaagtcaagaattggggtttcagaacctccgcctagatttcagaagaggtatggaaacgcctggatgctcagacaggagtttgctgcaggggcagggccctcatggagaacctcttctagggcagtgcagaagagaaatgtggggttggagcccccacacagagtccctactggggcaccacctagtggcactgcgagaagagggccaccgtcctccagatcccagaatggtatatccactgacagcttgtaccatgtgcctggaaaagctgcagacactcaatgccagcccatgaaagtagccaggagggaggctgtatcttgcaaagccacaggggcggagctgcccaagaccataggaacccccctcttgcatcagcatgacctggatgtgagacatggaatcaaaggagatcattttggagctttaagatttgactgccccactggatttcagactagcatggagcctatggcccattcgttttggccaatttctcccatttggaatggctgtatttacctaatgtgtgtgccccccttgtatctaggaagtaactaacttgcttttgattttgcaggttcataggcagaagggacttgccttgtctcggatgagactttgggctgtggacttttgagttaatgctgaaatgagttaagactttgggggactgtttggaaggcatgattggttttgaaatgtgaggacatgagatttgggaggggccagggtggaataatatggtttggctctgtccccacccaaatctcattttgaattaccacatgttgtgggaggtaattgaatcatgggggcaggtctttcccatgctgttcttgtgatggtgagtgggtcttatgagatctgatggttttataagggggagcttccctgaacaagctctctctttttgcctgctgccatccatgtaagacatgacttggtcctccaccttctgccatgattgtgaggcctccccagccatgtggaactgtaagtccattaaacctatttcttttgtaaattgcccagtctcaggtgtgtctttagcagcagcatgaaaatggactaatacagggagattattgtggtttatccaagatgtgtccaaaataaccacaaggcccctttcttataagtaagagagggaggcaggtgtgggtggagatgtggagacagaagcagaggacagagtggtttcaagatgctgcactgctgtctctgaagatggagaaaaaggacacaaccaaagatgtaggcaccctctaggaggtggaaaaggagaagaagcggactctgacctggagcttccagaaagcacacagccatgagggcgccttggttcatgtttttatgtcactcagcttgtggtaatttgtcatagcatcaacaagaaactaaaaaggtgtcacctttcctcatctgacggtgtgtgcaggtgggataaggggtcatttagagttaaatcctgatgcaaatcctgaggtaaatcaacccattaccagttgttttcttacctctcatctcatgatgaacagcctgtggcagtggcagaacacccttgggaaccatggctctgtgctttagtgcagggactggcttgtttgtcggaaggtgctgcccggtccaagtgaacctacatgagattgtcacccttccaggggccctcagggaagggctgagaaccgctggcccaggtgtgtggaggagctgcaggtgaggcagggctggaggggccaggtagaggagcagacaggttgtcctgtcaccatgggagcctgcatgagctttaggttggggagccctgctcctctgacctggatgctcctgtgtggaaaggaggcttgctcaatgagatccacgccagggggtaaattgggaactgatgggaaatgaggggctagagtcctgggtaatgccttggaggaccttgctcgaggactgaatttttggtctgtccccaccttgattactctgacagcccctctctgtgtcccaccaggggtaaaaatgtcctgagcagtggccactgggacagaggagaacctggtggccagggctaagcatccaggatcctggatttggggacaggcaaactcacttgtggaggacagtgatagacagggccgccagggcctgggtgaagagggcaggagggctcaggacactggaggctgtgtgggggtcacagccacgatctataccacccatgtatgctcctgcattgctcacctttgtgtggacatcagatggccccatcttccacgctcctgagaccccacatgcattcacagaggaacccaggctggggcagtgcatggccttggtccctggggtagtgggaagacagctgagtgcttggctggctgggcagggctcctgtgaatcctgccctttcctgtgtagggtccaccccagcctgactcccaaccccctactcctgtctcccaggaaagagagactggggttgagaaaaggtggagatattttccctgtgtgagctgggagagaatggacgtggagtttcaggtgagtttctgctaagttctcacgagcagaaaaagagccaatgagaggaaggttcccctttattcagatcctttccaggtgaccccgggtgggccacaggcccattcactttccctgcaagcccccacttcctgtggtgatgggaagcctttgtcctgacccacccagagcccagggcagtctgttgaggtctccatatattcagcagggactcccatccctccctgtccccaggccagtgtctcctcaggactcagagctggttctctggctcaggctccatgtccttccccatccccagggctgggagcttcggggacgctccaacaacccacaggagcagctcccagaggaacctaagaaaccacatctgctttgtggttgacccagcagtaaatgtttgtgtcatggtttagcaattcctgcaaaaaaaaaaaaaaaaaaaaaaaaagagaagaggccttgacccctgtggctttctgagaacagagtctggtgtctcccaggctctgggcccatccagggctgctctgatgctgaacctggctgtgctcagggggttcctgttcccaggccccttcctcatctgctcaccaccccctgttgtgtttgcagtttcctgaatctcagagctcagccaggtgtgggtgggggcagatcctgggtccccctggagcctgcgggaccagaacacctgtgacccacactcacctcatagatgggagcggctgtcctggggtcgggtagcggggcctgggcaggggagagaggggatgtcaggggacagagagggagagacatggaaggttcctgtctctgatcggccagaacttacttccctgggtctacttatggtcatttcccctcaggagtgaccagctctgcccttgagctcagcctcccagtgtggacacagcaccccgacccctgtcctggctgggcccaccctgcacccttgttaatgtgggcccctgactgattcttccagtgtccactctgcacctgctgcactccaggggtctcctcaggtgacggagggccccggggtggggtcagcacagggcatgggtggtcctggccatgtagggaggcctggatcctggccggaggcactcactttgacctgactgttctggggaaaggtgggtttgtgctatgctgtggggttgatggtccccctgccctgaacctgtactgctgggaccccagtagaaaggggctggggaggggatgggcttacagggtaggtggagttgtttgagggaccatggcctgggggacacagacaggagtcagcagctgggtgggaggagagcctgggcctctcatggaggagggcattggggtcctgaactcccagagagtcagggagacagggcatcttaccaggagagacccctctagccattttaggggccaagtgagcaagtgagtttgcagaggtgacccatgaccaagagcccacaggtcagggctgacctggccagttggggtcccctgcaatgacgttttatgagactcctccttgaagccccatggaaaggatcagaggacctcaggggtgactggcaggagtggacactgtgggccaggcctaggggttgccagccacacccaggctgaagggacactggggagctgctctctaaagtcatgctggccactggccctaggagaggtcaggcttatttgtgaggagtacaagattaaaagccaaactctggagttagaacaggggatgaagaggggaccctatttccaaagaggggcatggagatctcctttctccattggttctgtatcaggagctgagccaggtgaggggatcaaagactttacaaaggcacatctgtcctggccagaggggaaggaccctcagccagatgctgggccaggagaacattgacccagggatgcaggaaaggaactgagggcccagggaaggaaccagatcatgggggtttgcctgagaggaagggttaagtccccagagggaaagcagggccaggcacatgtgcaggacactgaggggaccaaaggtgtcttggattctcccagaactcagtgtccctgctgtggccagaccctgctctcagggccagtgatgctgaaatgggacaacagccttgtcttctctctctaccccttggcaagagacataaaggacattccaggacatgccatcctggcacccaggttctcttgtctcacagctcaggggctgcgggaactgcattagccatgggggcactgaccctacccagcctgtccaagctgttacatccttcaccgtgtgaccatgcccaggactccctctcagatcctgagcctgcaaatcccccctcacttggtggatggattcaataaacagcaggaggtaccggggttactgagcactccctcccccgctcccttcctccaggcagctgtggctttgctgtgtgagggaactaggaccacactcaggggtgagaccttaaccaggccgaattcacagaggaggaagctgttgaggaggcagcccagggtcagcagctggtgagggaggagctgtagaatgagagggaaggatctcttggggagggctcaaagagcctggccctgaatactggggggggtcttcttcctcctggcctggggtcagcctgggggtgggagggaggccaggaaaaagctgtagtaccttccagtcctgacgaggagcaggaaacatgccagggtggccaccggtgccaccccgaccagaaccctggtcacgatgccagtgaaggcccccacaggaaggcctggggcatttttttctgcagaaaggggaaggcaaaggggatgaagcccaagtctgttccagggggaaccatgaggggccttgcagggcaggggcttgttcagggaggaaggaaatgccacggagtttgagtgtggtctgttgtgctgtcctcatagctgactccctcgctctctgtggctgcaccattttctgtgtctcaggcttgaaacactgggatgcgccgactcctacgttctcccccaggagcctgcacctcgccctgctcctgtgcctttaaatcccttcttcctctcacttcatgcctcttaccgcttttttcttttctattttttgttttttgaaacggagtctcgctctatcgccagactggagtgcagttgtgtgatctcggctcactgcaacctccacttcccaggttaaagcgattcttctgcctcagccttctgagtaactgggatcacaggcgttcaccaccacccccagctaattttttgtattttaagcagagacggggtttcaccatgttggccaggatggtctcgatctcttgacctcttgatccacccacctcggcctcctaaagtgctaagattacaggtgtgagccaccgcacctggccttttcttcttttgtttttttagatggagtctcgtccaggctggagtagagtggcacgatctcagctcactgcaacctccatctcccgagttcagatggttctcctgtctcagcctccctcgtaactgggattacaggaatgtgccatcatgccaggctaatttttgtatttttagtagagacggagtttcaccatgttggccaggctggtctcaaactcctgacctcaggtgatccatctgcctcagcctcccaaagtgctgggattacaggcgtgagccacagcacccagtcttccctctgtttcttcttttccattccatgattgtcatacagagctagccctcgctgtcaactcaatgctgatgagcggggatgatgctctttgactgttttcgggggtcttccatgtgccaggcacagtgggcaccaacctacctacagctcatctcatcctcctatcaccttgagggaggggggcttcactcccatctgcagagttagaatctgagacttacagtgcctcagtaagtcaaggaaggtcacagaacttgtacatgatacaaccaaattttaaccaaggtctccttgacttagctaataacaaagctcataaaaataataatactagttgatagcactgattgagccctggctctgtgcactaccctgttaagggctttaattacattaatcttcaaataaacatcctcacaaccatcctgagatccaagtgtttgttaaaattctacagatgaggaaactgaggcctaggaggttgagtgtcttgcccaaggtcaaacacctggtatattcccggcactgactgtcaggcctctgagcccacgctaagccatcataacctgtgacctgcacgtatacatccagatggcctggagcaactgaagaaccacaaaagaagtgaaacagccaattcctgccttaactgatgacagtccaccgttgtgatttgttcctgccgcaccctaactaatcaattgaccttgtgacattcccccccggacaatgaatctcatgatctctccaccgtgcaccttgtgacccgccccctgcccacaagagataactacctttaactgtaattttccactacctacccaaatcctgtaaaactgtcccacccccatctccctttgctgactcctttttcagattcagcccacttgcacccaagtgaataaacagcctcgttgctcacacaaagcctgtttggtggtctcttcacacggacgtgcgtaacactgaccctgatagttgacacaagggatttagttccagataaaaactggtgaattctcctattgttcctcactcctcagatcagaatctccccctctgcactgtggatgcccaagatgaagggagatgaacccatgactggtctcaggtctgcagatgcctaataacaagcagcctcacacaaccccagtggaggagaggagggggctgtggctgcagacagacctcgcatgactctaatctgccacctatggactgtgttgttataggagttattaggaaattattttagggagatagagaggaaagggggtccttgggaagtttttctttttctttttttgagacggagtcttgctctgttgcccaggctggagtgcagtggcatggtctcggctcactgcaacctccgcctcccaggttcaagtgattctcctgcctcagcctccccagtagctgggattacaggcacgcaccaccatgcccggctaatttttgtgtgtttagtagagatggagtttcaccatgttgcccaggctggcctccaactcctgacctcaggtgatccacccacctcagcctcccaaagtgctgggattacaggcatgagccactgcttggccagtttttgtttcttttaaagcagttccagaaatgttgcttgtctagcagaaaagccccagctcttagagcctggctggcaagctttgatatacaaatgaaggccattagaaactgggtccacccaaacatggggattcctgccctcttcttgcccttgctcccatatgtgcctggcaacacggttgccctcacatatccccacgtgtgtagaaccatcaaggctccctgcatttgcatattaaaaggccagggtggagggccagtttcttcttgggctacgtgaatgacatggctggtcaaaccaatcccctgagccctgtgcaaatcagacaccacgtcctccggcctcctcatataactggctgttttctgctgcacttagggtttcctctctttgcttggaacccccctccgtctgtccctgtatgggggagctttttccttcttttttgcctattaaactctttgctccacatgtgtctgtgttgttttatctaaattggcacaagaccgaggatcctggtattgctccagtcatcagagccatatcagtgtgaccctagtcagtgactgtctccctgtgcctcattttcctttcaataaataagataaatgctatttggctacaaggttgtttatgaattaacctcaaaatgtttacaattacttgatctcagctctgcacagagcagctgcccagatgaacagcatgtatgtatttgaaatgcttgttccccagtgctgtaaagaaatagcacttgaacataaatttaattttctcagcaaggccatttttatattttctgtagaaagggtatactcgccagcaattttgtgacaagagtacaccgaacaaaggagacagggtcatttataatctgacgtgtctaccttactgctgtgtccggtttccactggctggaacaggatgtcacattttgtatttgtcccgattggctagcaacttagaactttttaaaagaggcaaaggcagaggagaacaaaggaaggaggaagtaacttgtggaatgctgagaaaggtaaaaaccatcttcaaataaagaagaggagcaggctatgacctaatgcttgcttggaccagtataagcatgccagggcaaatatttaggctaaattgtgggagctaagaacataaaatacatttttttttttttttttttattacagctagcagatatttaagaatgttagcacacgtctttgagtaaattttgcttctaagagaggttgctatttattcctaattagacagggaggaaagtctttgaagaggaacctctactttactttttacatatgcttatttgcctgtaagagaaagggccctgggcctgatttcaggtggagaaggagctgctgggagcatcctctatttgttcctccccctagggaccctgaacttacaagggagtcacctaagtcccccagggcaatgggctcatgccctagtaatcttgtccatctgtgctctacatgctgagtctcaggtgaatgttgaggctctgtctttgcccagatgagggcctgggggctgagccctggctagtgaccagctccaggagccactgcccttggacagctggtaaattgtggctcccggtcagcccaggaggcaacaatccagctctggcataggctcctcagggctccacaggattccacagacccctcagtccagaccctgacttagttctccagggtcttctcaaggtcatgtccatagggagggcatggggtgcttggctgagactgacctccccctgctgagtcccccccatcagactgtctttcctcagcagtgaatgcctgcagggtctggatacgggaaaggaattctgatctgttgaagtttgtctaccctgtatgtgtcctgcagtaaatgttcaaaccccaacatgggacgtaatacagaaggggacacaggcacagcccaggcctgacaatcccatgtatgtgaagtagaactgacccccaacagtcagaggctgtgggagaatcactcagtatacatggaactggccagatacttcttctttctcagggtttatctttatggcgtgtagggtgtagaatcctgtgtcctgggtgacattctgaatcagcagggatgcattggggtatattgtcccttgaatgctgtgggcaggccctgggggtagttattagagttcctattacatatcctgtaatatggtggttggcctccaccctttcccctttgtaccagttatagccaataagatcatggggcagattgtgagtgagtagaagaacctccttcccctttgtggcattggacagcatggcttcaacagtgagcatggcagtagtgggtgggttccagaaagttaaaactgaggctaaggtgggggagagaacatcagtcaatattgggacctatgtatttggatggaaagatggggccctgagttctgaggaggtctcttcaccccctagccctggagagagagagagagagagagcacgtgcacgtgcacgtgcatgcatgggtcctgctgagtcaaagtcagcagcatgacccccattccctcagcacctctgaccttggcacttccaagtttggaatcctcttccccaggagtctgcacaaacccccaccccttatcgccctcagatcctgctcacatcaggacatccttgggagacccttcccctgacacctcctctagagacccttgctcttctcttctctttctgacctttcccagctctgttccctccagggctcttgtcagcacctgacctcacattctagatctctttgggtgtctgtcttcctcccatgagagcgtgagctccgtgagggtggggacttttgtgatcttggttgcaccccagtgtctgggacaggctgcagactcctgtggatgagttcatgagtgttcccagggccctccatggcctgaggtttgtgggtaaggacagtgtttagtggccctggttctgtttttttctggagtgttaccctgacataacattttattgtcatcagttttcagaatttattgatcagtgatgattcacttgcagtatattaacagtggagattgtttctccattaacagcttcagatcattgagattttcctggtgtgacccctgtccctctctggtgtcctctcctctgaggctccaacagaagccctctgtcccccctcagagtcccatcctccccaggagatcccagtcagtctctgtgctccctcctcccacccactcccaaggagtcctcccctcacctgtgagaaggaacccctgccaggggatgcgccctctgcagggagggctgagggaagagcttgagctccaggaacgctcttgtcagggctgctgtgactgtcagctctgctgtccttcctccctgtgtgctgagcctcctcccagggcaggagcacttcccagggtcatgggtgggggtgggctctgcccaggaagcctctctgccccctcccctctcagtcctgccttcttgtccattcttcttttttccgttctgtcttcatttacattccccagactatgctttgagaagcaaggtttatttggacccctgtcccttaacaggacaaatcaccctccccagcactgatctctgctgtgtcttggccttgggtctgtcaacaccacacagagagtccctggggtccccgaacctggtttgttgtctctatgacaaagaaatccctcggtgtattcagggtcttcttagtgttcttaaatgtctgggaaggttggatttcctcccagcaaggaggtcacaaagatgtctggggtcctaggaatggacacatctggggctaaagcccaggtctaagagtcttacttgttctttctgcagcgctatgtggccctaatttcctgggagtaactgagaatgaagctgcacgttgctgtagtattatgtcatccagacctcagacatttctagatcacctttatgattttctctacagcttgttccacatttattatttacttcatactatttttctttttttgagatgggattttgctcttgttgcccaggctggagtgcaatggtgcgatctgagctcaatgcgcaacctctgcctcccaggttcaagcgattctcctgcctcagcctcccgagtagctgggattacaggcatgcgacaccatacccagctaattttttgtatttttagtagagacggggtttcactatgttggccaggctggtcttgaactcctgacttcaagtgatctgcccaccttggcctcccagagtgctgggattacagacatgagccaccgtggccagcccatactatttttttctaaataaatttagtttacaaaacatctttgtttatcagggcacagtggctcacacctgtgatcccagctactcgagtggctgaggtggaaggattgcttgaggccaggagttggagacaaaacatccttgtcttatgcagtattgtccatgaaattacagatttgatgtgtgcttaaatgtttttctaacatgcattaaaataaacacatgagtattaaaattaaaaaacagcttatttaactttcacctaaaatcagttttgggaaacgctgatacagtggcataagcatgcactttatatccagatagacctggggtcaattactggctccatcacttaactatgtcaacttggacacgtcacttggcttctgtgatccttgattccctgatttgtaaaaggaggatggtaaaatccaccttgcagagttgttgggaataagtgagctgctgtgggagccccgtgcccaggcagttgttgagtacatgatggttatcattgtggttattgctgtgggattctggttattttccagagagagtgtctatgctggaatattgggcttgtggctttctggtaatgtacatgtgtgataagttactttttcgcttgttaggacttgtggtgcatctgtcattattttcatgtcacagttttactatctatttgctctgcgattttggtcaagttgtgtaacttttctgtgcctcatttacctaatttctaaaatgtgggtaacagtaaactagtgtgagtgtgtatttcccagatctgaccactagagagcacagaagcaccagcaccttctaaccgtgggcctatcagtgccgatggcctgcaaacatcgttctcccatgaaaggaaccagggctccctggagaaatagctgattccagggctgggtcaggaaagcatagaggaacctggagctccttgtggggccagaaaataaggaactgcacgaaaaatggtggggatgtgtcaaaaggtcacagatttccaaggaactctcaatggtcaattttgggacaatatgaacaacataataaataatgatagtaatggattccagttcataaatacccatgaatccatgctgatataaataaataattgaataaattaaataaatgaggaagcagaaatagctttttcttgtagcagaattccagttaataaatgtagaaggagtggtggaaatggaaaatcactatttggctcacaacacaggaattgttatttataggcaaggatcatcatggaatatgaagaggcctggaatgaggcaggagtgagaacaggtggcgtgattttgtttccctgagaggagggaagaggcaagccatgagtcaaagccctttgatttttgtttgacagttcttctctctgtgttttcaaattatcccagcctgttgccttgtcacagagttggttgtgggctttgctactgcaggggttataaagcacgtgcaggggccagggactgtgctaggcagtggagcctgtgtgtgaattgaagggtcaggcagggcctaagcgtggtctgatgcaaaccactgatgtgacttctttcttgaaaattctaaaaataatctctgccttcaggagcctcaagtctaatgagggagatgacatccactttataaagcctagagatatgagtgcagtaatctctcaaagtggcagaagtgcatgggggactccgagttgggtggaacttgagctggcctcacagggcagggtaggatttgggttggtggagggcagagagaacggctgtgtggagcaggggtgtgttgtaggagaggcactctttggagctctttgtatggagatcattgagggtaggggctgtttgtgttcatttttgtattccctgaactcatagagcctggcactttgggagtattctataattgactgttgaatggaatgatcgtttcgtaacctgttaactgggcctgatgtgttagaaaatatgtaaaagtgcagcctgtgtattagaaaatgtgtgaaagtacagcctatgagcagaaagaaaatcttactgaaaagcgatcccacgtacacatggagcctggtgcggccgctttacttatgctgctgagttctgcatcagtccacaccgaggccaccacaggggccgggagctcctcctcagaccttcctctgggtccctcaatctctttacccccctgttctcccaggtcctgctccctgtcagttcactccatctggtttcccctccatgcacttggggtgggtatcacatcctgtgtctcatcacagggggctttgggtccctcagatccattgattaaaacacctctaaaacaaatggactttcctcttgttaacatgacaacttcttataatgcatttcaagaacattatttgtgtcaagagtctctctgatgtacagaggccctccctcccccaggaaggaggtcaggggaagttaggagaaaacagtgtcctgtctgggttgcttatttccctattctgcagtgtatttggtagacgttcaaaaatatttgttgactctgtccatgatccacatggctctcatatagtcatttattcacacacacattcagtgaggctttgagcgcctagtgtgtgcctggtatttgctagatggtggatgctgagaagatcagatgtgctgctgtctctgaggagctttcactatatagctgcacctagggtgaccgaatgcacctgccccactttacagacatggaaattaaagtgcaggcaagtcataggactagttcaatgtcacaaggtcactagcctcaaagttataggagtaaatcaagttttctgacttgctggattttctgttagtgtgcagccacctggctgctgcaggtgcagacatggtgagctccgataggagcgaggacgctcagagtgaagtgggagccctgagcaccctggattaaccaggaggacatgccgggtccagctatgactgcacagaggaccatcgggaacatttgaattctctttttcactttgagcttgaaatgaagaaaactgatcccagaaaaccaagcgtggaaggtatttcacagggcattggtgagatgggtcagaaaatcctgtgttgatgtctgtcatcatgtttgtcactgaatagtaatggtctgactttgagtgggttccatctgtagcctggagctctgtgaggcagggaccaggtgtgattcacctttgtctctccagtgacagtacacagcagactccgataagtattttttttttttttttttttgagacagagtctcactctgatgcccaggctggagtgtagtggtatgatctcggctcactgcaagctctgcctccagggttcacgccattctcctgcctcagcctcccgagtagctgggattacaggcgcctgccaccatgcctggctaatgttttttttttaatgtttttagtagagaaggggtttcaccgtgttagccaggatggtctcgatctcctgacctcgtgatccgcccgcctcggcctcccaaattgctgggattacaggcgtgagccaccacgccccgccctccgataaatatttcttacaaaataaaacagaataaaaagtagacatctgcacaggtgtgggatgactgagcagcagcagaagcaggaaaagtcagcgtccccagatcagctgatgtggcatttggcttctagataggggtgaggtgccaggacagggacgggggtcctggggctctgctgctctggggaacacccctaggatttggagtgtctgctgtggttgctgcacttcacttgaccatgggaaagtgaccagagggtgtggggcttcaggtgaccctatatgggaaatggccgagggaagattgggtgggtggtgcatgggatggtttacccgtatttgaaggtcagttgtatgaaaagatgttaaacttatttcagcctatggagagtaagatgaggattggtgagtgtgaatcagacaccttttgactcaagacaaaaaagaactgttacagtaaaggaagtttccttggaaaattacaagtttactggcagaattcaagccagggctgggtgtctgaaaatacctctcagaatgatttttaagctaacaagggcagagcttggctaggaatgtggttttccactgatatcacatattaaaaaaatgtcctttgcaatgggacattgctcaatgatgcaggctgagctctctatgacagttactttcagtcatgtgggcagctgtgattctcttatccagtccgtgacttggacttcaccaactacctctggcaggctgcccctgccagccctatcccctcttttaccccaggagttaagtgcattaactaatgatggccacaaggtggcagtgctgctgctgctgcttttttttttcttttttctttttctgagacggagtctcactctgttgcccaggctggagtgcagtagtgcgatctcggctcactgcaacctctgcctcccgggttcaagcgattctcctgcctcagtctcccgagtagccacgtagctgggattacaggtgcgtgccaccacacccagctaattttttatatttttagtaaagacagggtttcaccgtgttagccaggatgatcttgatcttctgactttgcgatccgcccgcctcggcctctcaaagtgctaggattacagatgtgagccaccgcacccggccctctctggtgttttctaaaacctctacctgaatgtgggcaagcctaagaggcttttaggattaagaaaaggtcatgaatgaggtgaaaggtaaacttcattattatttttctcttgtgaggtgacatagttgagtgtgaaatagttgcattttagaactggaagacactggagagaagtgcttcacaaatcttaatgtgttcatggatcacctgaagatcttgattaaatacagattcggattcttttggtggggcctgagattctcaatttctaaggcgcttttggatgatgtcattgctgctggttggtggaccacactttgagtagcaaggcttgagggtcatttagagattaattctcattccatgtgatttatggctgaagagagaccaaactacagagagagaatataacttgccttccataactatgccctcactgcatgactttttgcatttaaacccagggcttcagcttctccgtccaattctcgtttcatgcatcacgtggcccctacactgttgttggtggcatctctttaccttaggaacccagaactccatttccaccacccactgatcttggctcaaggtttcactttgactgggtctgcccttcctcaaaaccttgaggggctcttctataatcacaagatcaagtttgaacctcggtgtctactgttcatgcctctacaacatgtgattccccctttagcaagcttacataacttccctgtttttttaactgactctttctgctctagctctccctgctccttcctgttccctacacatacttcgttcaggtccctcaatggtagtggtggttacatggtctctggtgttagactcaccgagtttctaatcccatacccaccaccgaccttggcaagttacttcccctttctgaggatgagcatcctcctctgaaataatttcatgtattgattgagagagtaaataaaataacatctgcaagcccactgtcattcctcggaccctctttaaaactagcatctacacagggtggggaacatcacacaccggggcctgtcgtggggtggagggaagggggagggatagcactaggagagatacctaatgtaaatgacgagtaaatggggtgcagcacaccaacatggcacatgtatacatatgtaacaaacctgcacattgtgcacatggaccctggaacttaaagtataattaaaaaaaaaaaaaccaaaaccaaaaaaaactagcatctacagtggtgcctgacacctggttccctggcttatgtttctccatgtctctgctttcctaaggctgaaccattcaaggcctaacctgaaccctgtctcttttgtgagcatttgtttctttctttcttttttcttttttgttttgttttgagacggagtctcactctgtcccccaggctggagtgcagtggcgcagtctcagcccactgtaacctccgcctcctgggttcaagctattctcctgcctcagcctcctgagtagctgggattacaggtgcatgccaccatgcacagctaattttttttttttgtattttagtagagatggggtttcaccatgttggtcaggatggtctcgaactcctgacctcaagtgatctgcccgcctcagcctcccaaagtgttaggactacaggcatgaaccaccacacccggccttatgagcatttctgacccaattgatcccacccttctataaattgtttcacccatgtattggcatttaattatgtcccagtgagaccccatagggaggctggaagggtgttggctgtgtgaaaactgaaggtgaattgagtgagctcctttcttactaccccctgagtgttagagctaccatctcttttttttttcagctattgccagcagcagttcctcctgcgccagctgcaccagaccctgggcaggcaagtgaataccttagggtttgttcctgtcagggtcactcctgcctctgggttttggtgaaactggcgttttcttttgcatcttatcaggtggcccctctgaggaggttattgatgatatccctttatggaaagcctaaggtaataactctaaggaagttgagcacagtattttctaacttaaacagcttggtggcaggagatgtgtacactttcctatttcataaaatttacaacagattcagaagagattaaggacaaaggaccaaatggggaggacaggtttgtttaagggaggtcatgtactttcaatctggagtctatcaattgttcattcaactctgtgtggaagtgtgcatctttgcatgtgtggtcgtatatttggatcacatgattcataattctgtccctgtcagtggcaattaggagttcatgttaggcttatgaggataaaatatatgggtgtgcactattactgaagccagggtttctgatatctggagagaaaataggccaggagggctggtcactttacttagtgccctgcctttctctctctctctctctctttctcttttgagacagagtctcactctgacacccaggctggagtgtagtggactatagctcacttcaacctccacctcctgggctcaagtgatcctcccatatcagcctccttgttagctgggaccacaagcacatgccatcatgcccagctaattttttgttttgtttatttgtttgtctgtttttgtagagatgggttttcaccatattgctcaggttggtctcgaacttctgggctccagtgatctagccattttggcctcttccaaatgctgggattacaagtgtgagccaccattcccggccctgccttctctttttattagacagcagtctactcactcatcatgttcccagtgaggggatttttaaccttctcattttcctaccaggggtccatgccaaagtccatatgtgtttaattgtgtctagaattggatgttctttttgaaaagagcagcccaaggaatggcttcttagctgatatccaggattctaatcttcattgtctaaactttgggtttccattcctggatactggttagagtaacttgtagggcatttaaaatgtaccaatgtctgtgctttccccaagtatgtctgactggattggtgcattgtgtgcccaggcattggttgtttaagaatgcttccaaggaaaacggtcattttattgtggaggaattttagcccagggctcaaagttaacatcccattaattagagatatcgacatcttagggcatcctaatataatggatggagaaggcacaaaatcgcctctttggttttcttgaccgaagtgtataacctcagtttaatcatgagaaaaaattagaaaaatttaaactgagggtaactacaaaataacaacgccaatacttttcaaaaatgttaaggtcatgaaggcaaaagaaattctgaggaactgtcccagattaaaggagactgagaggacaaaacaatgagatgcaatgtgtaattgtacattggaccctgttccagaaaaaggacattagagggaagataaagaggatttgaataaagtctgcagattcattcactgtatgatgtcagcgataatttattgattttaatgtttgcactgtggttatctaaaacaatgtttggggaagttgagtgaaaagtatatggggactgtatttttggaacatttttgaaagtctgaaattatttcaaaatgaaaagtttgaaaaaaaaaaggagaagaaatctagatatttctattaagttgccagacttgaagaccatttcccaagttatcttgcctaatattgtagagtaatcttcctggaaatgctgtttgtcacgtttgtgagcttctcagagctttccagtgacttctcttatctgtaggatgaagttcccattccttaggatgccactcagagccctcatagcccggccccaatctactcccttgatttacattgaaggacctgacccacattttactttctcatttccaaacattttctaagtcttttccctcttcatatcacacccttgcctgtcttctcagcctcctgagttgttctttgtcctaaaggcccatttcagaccctgtctcttcattgaagcctgtatatttatttctgttagaagcagtcatctttcctttctttgaattcttgcaggtacaatggtgtggagtgaaacatgagttttatttcattatattatattttagaaaaaaatcaatttattctgctcattaaaagtttttcttttaaaaaaatcttaaaattttcattggagaaggattagagattaaattgttgatgtttgaatttcgttgtggtttaaaaaaacttttattttaggttcagggtacatgtgcaactttgttatgtaggtgaacctgtgtcacaggggtttgatgtacaaattatttcatcacccagctactaggcctaatactcagtagttatgtttcctgctcctcttcttcctcccactctccaccctcttgtaggccccaatgtctgttgttcccctttttatgtccatgtgttctcatcatttagctcccacttattttttaattttaatttaatttaattttttttttttttgagacggagtctctctctgtcacccaggctggagtgcagtggtgcgatctccgctcactgcaagctctgcctcccaggttcacgccgttctcctgcctcagcctcctgaatagctgggactacaggtgcctgccaccatgcccagctaatttttttgtatttttagtagagacggggtttcactgtgttagccaggatggtctcaatctcttgacctcatgatccacccacctcagcctcccaaagtgttgggattacaggcgtgagccactgcgcccggccttagccccacttataagtgagaacatgcagtatttgtttttctgtttctgcgttagtttgctgagcataatgtcctctagctccaccaatgttcctgcaaaagagatgatcacattattttttatggctgcatagtattctgtggtgtatatgtaccacattttaaaaatgcagttttccattgagaggcatttcggttgattctatgtcttctctattgtgaacagtgctgcagtgaacattcatgtgcatgtgtctttatgatagaatgatttatattcctctgggtatatacccagtaatgagattgctgggtcaaatggtagttctgtttttagctctttgaggaattgccatactgctttccacaatgattgaactaataattgacactcccaccaacagtgtataagcacccccttttctccacaaccttgccagcatgttacttttttttgacatttttgataatagccattctgacgggtatgagatggtatctcactgtagttttgatttgcatttctctaatgatcagtgatagtgagctttctttcctatgctgttggccacatgtatgtcttcttttgaaaagtgtctgttcgccaggcagagtggctcacacctgtaatcctagcactttgggaggctgacgtgggtggatcacttgaggtcaggagttcaaaaccagcctggtcaatatggtgaaactctttctctactaaaaatacaaaaaaattagttgggtgtggtggtgggcacctgtaatcccagctacttgggaggctgaagcaggagaatttcttgaactcgggaggcggaggttgcagtgagccgagattgcaccactgcactaaaaaaaaaaaaatgtgttcatgtcctttgcccactttttagtgggaatttttttttcttgtaaatttgtttaagttccctgtagatgctggatattacattttagtcagatgcatagtttgcaaatatgttttcccactctgtaagttgtctgtttactctgttgatagtgtcttttgctggaagcatgagttttggattcagaaatatgagtctgagtcctagttccaccttttatcaggtgagataagggacaagttaattgatgtcttggaatagagggataatagtgcctatttaaagggtcattgtgagcattggatgaggtacaaacataaaggtccccagcaggtagcagattacttcctcttcattcctgtagctcagtggttccaaaggtattgcgggtggtgtgaactttcttatcaaaattttctatagatccttcaactaagatagccttgaactgaactgaatgcttaggactttaagaagttcaactgacgtttggatttttgtgaaaacaactcagtaaataagttatctatcaatagaggaatgtaacccaacagaggaagaagggaatgacaatgggattgtaaatgggagaaagctgtgatgccttccacacccatccctttgttctcagtcagacaatatcaaggaagtacaacttctaaaattatgtaaaggaaaataaacacctcaggactgccaaactcattacaccaaagggatacttcagcctggagattgagtcatgcaagaccaccattttttccccaaatgaacaactgttactttacaaccttgtgtcaaagcattgtacattagccagagccccaggagaagatgaaaaggccctaggcatatctggatgacctccctcacaaattgtttttttgctgtcctcgaaccacatttgaagtatatttgtggaacagactcttacaagtactcttaaatgttggcttctcataactgtggagctcatgtcactggactaggaaaaaaaacccaggactttagttaaaaaaaatgcattcatgatgattgctaacccaacatcaagcagaacaagagttaattacatgaggataaattgatacaggactaaaatgattttttcatgaccttttttttaaaaaaaaacattgctgactttttttatgttttgttctccagagtcaaaaaagctttttttttttttcttttgagctttttagcttacaacaaattgggtaaagtataattttgtgagctaaatttgaaagatttatctttctctctacccaatttctacaaaaataaactatttgtgcatattcttaatttatggcaatatagatatttgcataaattccataagaatttgttttcttttataacaggacacaattggagacattggttattttatagaggctttgagtgaaatggtatattttcagatatgaccagaatgctttgaggaattgagattgactttatagaactgacaaaaagcctcttggacagactgacctggttaccttgtctatgcagtttctataaaaagttaatgatctgtggtaagtaaagaatgtcactttctgataggcccaggaacccccaagttattttgagacctcaagaaaagaggaattcaccaaattcatgcaggtatctacaggcacagataaattactggcttgcatagccttgagatgcttttggaagtctaatctgagattccttatgaaaaaaagtctcagcaaagccaatttaaaaagactctctatggccaaccactattcttgccatactttatgcaaataatcaggccaggtataagactaaaacttatttagcaaatacatttgtcctgctatgatttgtctttcataaaaatgggagcctggagagagaaaaatttgtgtttcaaaagaaaacttcaatacaactgttattaaattctaggcttgttcattatttttgagttttattatttgcctataatttggactgaatcctaaattctttcctggctataaatatcaaaagtaatgatttcaagattttcttccattttggaatgttagaaattaaaactgtgcttttcttcaagccctgcaaactgaaactagacaagttaagtgaacttttggagaagtcacagcaacttatatataaacaacttttgtgcccgttgatgcatggactacacgaaagggtcacacgaatactggatttgtactgaaattcagagaaatctgtgagattgtcactgcagttagatgattcagagactctagaaaaatgagtctataggctgggcgtggtggctcacgcctgtaatcccagcactttgggaggctgaagtgggtggatcacgaggtcaggagatcgagaccatcctggctaacacggtgaaaccccgtctctattaaaaaatacaaaaaattagctgggtgtggtggcgggagcctgtagtcccagctactcgggaggttgaggcaggagaatggcgtgaacctgggaggcggaacttgcagtgagctgagatcgcgccactgcactccagcctgggcaacagagccagactctgtctcaaaaaaaaaaaaaaaaaaaaaaaaaagaaaaagaaaaatgagtctatagactgctgtagacattagaggtgagccaacatgcaactgaaagtgttagtgatcatggcccaaagaattgctctaattgaggaggcagttgtgtatcctcagttggattccaggattatactttgttgttgttgttgttgctgtaattagtccttggtccttttctgatttgacttcacccccttttccatgggagatgacttcctaggaatgagccttcatagtgatgtaagatcagatgaaacatagccacaaagtcatgtatttaacagtaatttctctgaaagatatagaagaatgttggaggtgggcaggtgtggtggcacaggcctgtaatttcacattttgaaaggccaaggtggaaggatcgcttgaagccaggagttcaagactagcctgagcaacaaaatgagaccacatctctacaaaaaataaactaaaataaattagctgggtgcagtggtgcatgcctgtagtctcagctattcaggaggctgatgtgggaggacctcctgagcccaggagttccaggctgcagtgagctacaatcatgtcactataccctagcctgggtgacagagcaagaccttgcttcttaaaaaaaaagtgggaggcggggttggggcaacaggaaggcaaaaagcctcagggatctccagatgactgccctctaaatagttctttgctggcctcaaaatctttcaagatgtatagcgtttcataaaacaaggcatgtcaattataacttcaggtgtgcaatcaaaatctagctcctaaaactaaagcctgttaagttttattctgataatatttatcttcccaggcacagaacaaaggcaaaatgagatcaattattcttccacctatcccatctctttctacctgtcttcccccctgtaaggaaatatataaatactaagccttctgcaacctcttcagagagaacacacccacagaggttttctgtgattcatgttttcccagggtgcaccctcaagctctggctcaataaaccttaactggtcaagacccttgcctcagtcaatcattctggatgaccaccatgagtcttgcacaggccttcactgatccctttgctgcccaggtgatgtgtacctaggtgaatcaggtccccacgagtcaaacactcttctccctttctgcctcctctacctccctctcctcattcagtgccgtgtgccctggtctggccccagctccaggccattagtattagcctaagaaggcaaggccaggatgaacaggctgagaaggaaatcagaggccaacaggcatgaaaagaggcagatgggactgtcatttctcagagccacccactctgggtgtgttttatgactgctactggatttggaatcttttcctctttgtggccataatgggaactcacccttctcctacttccttcccattacactttctattcatagggaactccttttatgaccagagaaaggctgtaaaaatagttgacaattgagtaaaactgactttataatgactgggaacctggctctgtttttttccaaaagagactgagattcctcaaagctagcttttatgcagggctgtgcagttgtgagtgtagcattagggaacaggtacataagtgaagggtgagacagaaaacaaaatgctggctctttgtcaaatcctgaaagtagagggggcaaaaatcattctggaaggtgtatgtcattcaggagaccttggaaatctcagggtatcctcttcccagatgaagtggaggatgaggttaaattatggagttgggtgtgtgatactgggtacattacttctctgcctcgttttttttttgttgtttttttgttttttttgatggagtctcactctgttgcccaggctggagtgcagtggcacgatcttggctcactgcaagctctgcctccagggttcacgccattctcctgcctcagcctcccgaatagctgggactataggtgcctgccaccacgcccggctattttttttgtatttttagtagagatggggttttacgatgttggccaggatagtcttgaacttctgaccttgtgatccacctgcctcagcctcccagagttctgggattacagttgtgagccaccgtgcccagcctgcctcatttttttaatctgtaaaaatggggataacatccaggaatttttgtgaagatgttaactacatggaaagatcttaggatagttcctggcacatactgagttttaagtcagtgcaaactattatgattatgggaataggaaaaggtgccaccctggacgtgtaggatgagggggtattttctagccagggtcctagcaggccaaccggagatgaagatggttaagcagaagcagcttaacttcaggagtggaaggattggggagcagtagctcatgcacaagattctgtgaaaatgcctttacctaacagcagaaatacccagaatgggtgtggcttctgtcacaattattgtctaaaaatgtgtcgtagactcaaatggcgttgatgtaagccaagtacagaaaagggcttcagggctgccttgcacatagcattcatcttgtcaaaggaaaacattcatcttgttaaaggaaaacattcattttgctaaaggaatccccacttgtagccctggttattatttttgtctcagtactattcttgtttatagtttgtaaagagaaagactgaagaagtgtgaaatacggaagtgcatgtatgaattaacagggcagaattgggactggtatgcgtaagttaagagaaagtgcatataaatttatgtgaacataaagaggacttcttgttttaagcagacctctttgtataaaaaatgtgggctgtcttgagtggatggcagactctatcacaagaacattctagcagagtcacgagagaatggggagcatgacttctttctaaatggcaagttaagagtatgtaagtcgatgaagagagaggagatgaaggagaagatgggtgaggatgagagaaatgggatagagaaaagaacagactgaaaggaatgtttaccaagtgctcatcaggtaccagcctctgtgtctaataccttacacatcttaatttactctttgactgtcattttctgataacagtaagagtcatctttgtgctgcagatgagaaaacgctgtaggaggtgaagtgagtggtccaggatcatccagccagttcatagcagagctggtgtgtttcacctcaaagtttgtgctcttgcctgtgattcacacaaaacaatgagatatagaaagaaggcaaatgaaatttttgttgtgggtgatgtttatggaagttaccagtgttaggcagaataatggcctccccaaaatgtccacatccttatccatggaacctgtgcatgttactttatttggcaaaaagacttcactcttgagatggggaggttattctggataatctagggtggcccagtgtaatcagaagggtccttgtaagtgaaagagtgaggcaggaaggtcagggtgaaaatgctgcagtctgagactccactaaccattgctggctgtgaacatgcatcagaagacaaaatttcaactaatgtagttatagatctgattggcttttaattgtgattcagggtttggggcagctctcactctacacatacagtgatagctccccctgggcaacataataacagagcaatgggttttgtcaaattggaaccagtagacagagccatagaaataaatggattggttaacatcagggtacttcaggttactctttttggggtaaatgttaaagcagaggggacttccttatgatgttgactcagggagactggaatcttctgttttcagaaaacattggtctgttttgagatctgcttccttaaaattccagttggagtatgcagcatttagtgtgagtggctctaatttggagtctttagactctcacttaagtgagagtgtgaccaaagcttaaagcattagcattactctcagttatcatcatttttggcttccattgtttataggttatgatatcctcctgatcacacatttctttgagtttatgtagttccagccaaatagagaccatttgatatttgatggatggcagcacgcaaacacttaaaacttttagagattacagcacaccagggagaccagtagtatgactatgaggaagataatgttaagagtttggagtatgcacctttggtaagatgcaaaccaactgaaatagaatagataaaagaatgaaccagatgagtgtagccattttaaccaagtagcatgtttgttaatttttgcaactgagactctataatacccgatatatttatccatgtgcaacaagaagcatcataaactacacagactcctctctgatcagccaatagggagcaattttattatctagcattgcatgcctgggttaaattaaaacagacagtgagaacaagtgagtctaggagtctgactctaaaagagaccatagtacatttgaacaaagagttgtgttaaagatgctgttactgtcagccattgggtggactaaaggatctcatacgtaaaaatttggggttgacacgatagattagacactccgttaatctatcattctctgtattttctcaaatataacatcccaatcaaagccttggtaatataaccaatgttttaaactatatcccattataaagacagcagattctcactgaacttgtgcaaataactgaattaccataaacatatgaatactcatgaatagttgcccagttctgtggcagtcaggtagggagcaaaagtaaatgttataatttttgttcacaaaagtctgctttaccaaattgcagtaaggtatagatagcttaaaagataaagaaattcataaatctgaaaaagaaaacacttaaagaattggcaatttttcaaataaaaaatcttaaaaacgggctgggcgcggtggctcacacctgtaatcccagaactttgggaggctgaggcaggcggaccatgaagtcaggagattgagaccacagtgaaaccccgtctctactaaaaatacaaaaaattagccgggcgttgtggcaggcgcctgtagtcccagctactcaggaggctgaggcaggagaatggtgtgaacccaggaggcggagcttgcagtgagttgagatcgtgccactgcactccagcctgggcgacagagcgagattccatctcaaaaaaaaaaaaaaaaaaatcttaaaaacattatcctcattattatttagttcaatgaaattcatgtttttttccttctgtgttttggtgggcaacttcacaaaggtatcagcctgtttgcaagttcatagacagtccagtggcgtgatcttaaagttatcaggaacttgtgttcaagagtactcgtcagagtattttccataaatcttgaagaagaagcaattttgaatggtagctgattgcaaatgctttgaggaagaataaaaacaactgtctgtgaatgacaaagattgaaaatgactatggttaaaactctgaggagagctcattatgataaagacacagccacatagaaatttagttacttctgtggcatatgacattatgactgataacatattcgatttctaggaaactcataatttttggaacactcatatcggtaacataaccgtaaatataacttagagaaggtttagcaccacttatcaattgacaatgctttccatgtaatttaacatatcaagtaaggctgggcgtggtggcttatgcctgtaatcccagcactttgggaggccgaggcgggtggatcacaaggtcatgagatcgagaccagcctgaccaacatggtgaaaccccgtctctactaaaaatagaaaaattagctgggcgtggtggcaggtgcctgtaatcccagctactcgggaggctgaggcaggagaattgcttgaacctgggaagcagaggttgcagtgagccgagattgtgccactgcactccagcctggcgacggagcgagactccgtctcaaaaaaaaaaaaaaaaaaaaaaaaaaaaaaaaatatatatatatatatatatatatataaaataaggtggcttttccacttagcttctgtttctcaactggattactgagttcttggtggagcccattaatgaacagggccagcaaaatataggcttgtatatgttgaaaaagttttctaggaaattctaatactcccagctaaagaaccattgttttagcctcatgtgctacctattagaacaggagttctccatcctggttacatgttagtagcatctgggaaggcttaaaaattaccaatgcctgggtcccactccagatagtaggtaagaatttatggatggggcttgagcatcatttaaaaaaacatttctcagtgattccaatgtgtggctatatttcccatcagatttctctgatttcttgtggcattcacttttttctattttggtattatgattatttttcatatcttatctcctgtcttaggctgtatgttctctggggtagggatcttgcctttttcatttctgtatctttcatgaacacatgaattggtcatcaggaaaaggttctcaaccacacgtaggctgtgtcctgaatctcaggttcacacattaatgctagagtcgttgttctccatgaggtcagaggttgcttgctttgaagggtatgtgggcaactccacagttcagatagtggatgggagattaccctgtttctaggcatagcattggaactaagaattctatgtgtatatggggtagatgcgcagggaagtgtaggaagacagttctaattaggatggaggaattatactagggagtagagggaatggaagtgagaagaattagtaaagagaagaaatgtgaacttatcaaataggccagagtaggcctctgaagattcttgagtaagtgagtgaactagattttaggaaggtaatgagacaatcatatgcaaggaagatttcaaatactagagacaagaagtcaagcaggacttcgagcagttgttgaggtctatgggaatggataaaatgacacaagtgagagatgttaagaaaggatcaaaagactttcatagtgtattgaatctgggaaacaaatgagcagaggctgggaataatcacatctaagagacagtggggtacagggagcatgcagaccagggaagaagagacctgcaggaattagtgctgagaagcaggagtttattgggaggaggaggagatccattcccgggatacaggtctctctcccaagcatggcggtcagccctgcaggaaacaggacaagaggaaaggccatcatacctgccagtcttcttgaaatgcagaaactacaccagagctactatatcagagccaccctggccagtactccaatcatgatgctgacagtggctctagctgagaggccaggagaacttccttgtactaaagcatctgtcatggaaagaaaagaagagaaggaatgaagttgatgccattttacagtggggtaccccaggaaccagctcctagcatgaagtagtctctacttgttttttcaaggaatacattatttttgtgggaaggttgctgggacgtgattagccaactatattcttgcaggattttttcctctcaccatgtttctaggttgacgatcagtcttcggtcaatttcatcctggcatttctttactcagatattttgaaggctttgtgatgtgaaaaagctgattgctattttatgtgtcattagaactttccaccttttcatggttgcatctttttctcagtgtcttagttgtggcaggtctctatggcagggagctgattgacagaaggcccaggtcagtgcattccaaattgaccacctcctttgcacagagacctctcttcccaggggctcccagcaggggtatggaagcaagcccagttttgtgagactctgtttaactctgatgggtgactagttggaggacgccccatcagccttgcctaaactcacttagaactgcactgctatctaaaacttctttttctttctccttcacaggaatcaaatctgcatcgtggtctgagggctctcccaggctcctctcacacctgccccattttccctcacaggtgtttttcctagtaaattatcttgcgtgtctaatctcatcttggttgcatctcagtgggttaaaaactaacataccaggtttgattctttgcacttagctttttttctctctttcacgtgtaaccagtaaccatgtcctcgtgtttcctgtgttgccttttttttatatgtgtgtgtatttacctaagataccttttacacacacacacacacacacacacaaccttttgcatctgtttctttatttctattggaaccatttacttttggccctcaccagtcaactcaggctgatgattaatgctatgttagctactgttgaggggcagctcctatgggccaggccctgtgctaaatactttacctcatttgatttatacaataactctcttgggtagaacattatttccattttacagatgaaacgacagaggcttagagtggtgaaaaaactttcctgatgtcatatggctggtgagaagtagacttgagatttgattctaggactactcagcttcaagctaatgataacagtagtaatatatcagctaaaatttatgaaacatttcctctgtgtggggcattttgctgaaggtttcattgatgattacataaaactcttaaaacaatgctatgaagcaaacactgttactgcaattttcagttgaggaatcagaggctcagagaagttaagaatcttgtgcaagaaatttataactgttaagtcttacattaaaaaagaagaaacatctcaaatcaacaacctaatttgcaacttcatggtacaggagaaaaacaaactaaacccaaatatattgaatgaaggaagtaataaggattagagtggatataaatgaaatggagaatggacaaacaatagaggaaatcaatgaaaccaaaagttggttcttcaaaataagatcaacaaaattgccaaccattaactagactgactaagaaaaaaagagacaagatggaaattactaaaatcagaaatgaaaatggactcccagcatggtggcttacaccttcaatcccagcactttgggaaggcaaattgggaggattgcttgaggcctggagtttgaaaccagctggggcaacatagggagaccctgtctctacaaaattaaaacaaaaattcagctgggcatgatggtatgcacctgtagtttcagctacctgggaagctgagttgggaggattgcttgagcccaggaggttgaggctgcagtgagttttgatcgcacctctgcactccagcctgggctgacctaaggagtgagactcgtctttctctctctctcaaaaaaaaaaaaaaaacaaacaaaaaaaaaacgaaagaaagaaaagaaaatggagatattatatatcaattctagagaaatattgtttacaaaagtactatgaataattgtatgccaataaattggatagcctagatgaaatggacaaattccaagaaacacacacaaaaaatctgaatagacctataattagtaggaagattgaataaaaatttcatttgacaaaattcaacattctttcttaataaaaacatgctaagtatgaatggaaggaaactatctcaatataataaaggcagtatgtgaaaagcccaaggctaacatcatactcaatagagaaagactgaaagctttccccctatgatcaggaacaagacaaggatgcctgcttttgccacgtctatttaacatagtattacaagtcctagccagagaaattaggcaagaaaaaaagaagactttcagattggaaagaagaagtaaaattatctgtctgttcacagacaacttgaacttctttgtagaaaactctaaggatgaaaaaaacctgttagaatttattaataaattcagtaatgttgcaggatacaaaatcagcatgcaaacatcagttgcatttctatacactaacaatgaacaatctaaaaaggaaattaagaaaaaaattttaattcacattaacatcaaaaagaataaaatacttaggcataagtttaaccaaggaggtgaaaggattgtattctgaaaactagaaaacattgctgaaggaaattaaatacgacctcaaaaaatgggaagacattttgttttcatggattggaagacacggtattgttaggaggataataccacccaaagtgagctatggattcaacacaatttctatcagaattccaatgacatttttttgcagaaatagaaaaatctatcctaaagttcatatggaatttcaggactcaaaatagccaaccaatcatgaaaaaaggaaccttgaaaaaaaaatgctgaatcctgatttcagcatttactacaaagccacagtaatcaatacaatgcagtacttgcgtaaaggaagacagaaaccagcggaatagaacagaaagcccagaaaggaatgcttgcatatatggccaaatgatatttgataaggatgccaataccactcaatggggaaagtgcagtcttttcagcaaatgattttgggaaagctggaaatccatgcagaaagatgagctgaacctttacctgacaccatatacaaaaaactaacccacagtagatcaaagaccaaatgtaagagtaaaaactataaaactctcagaagaaaacacagggaaaaaaactccatgacattggatttcacagtggtttcttggttataacaacaaaagcataggcaacaaaagaaaaaatgggtaagttggacttcatgaaaatcaataacttttatatatcaaagaacattgtcgaggaagtgaaaaggcaaccttgaagtgggaaaaatatttgtaaatcatgtatgataagggatcaattttcagagtatatgaagaactactacaaatccacaacagcaaaaatccaaaaacccaactaaaaaaggacaaaagactgaaatagagatttctccaaggaagatatacaaatggccaatgagcacatgcaaagatgctcaacatcactgatacttagagatatgcaaatcagaaccccaatgatagaatacctcaaacacattaggatggctttgattaaaaaaaaaccacacacacacaaacaacaagtgtttttaaggaagtggaaaaattggagctctagtgcattgctgatggaagtgtgaaatgttatagccactgtggaaaacagtatggctgtttctcaaacaattaaacaaagaattaccattggatccagcaattccacttctggacatatatgcaagagaattggaagggatttgaacagatatttgtacactgatgttcacagcagcattagtcacacaatagccaaaaggtggaaacaactgcaaagtccattgaaagataagtggatagaaaagtgaggtgtatccatacaatggaatgttcttcaatcttaacaaggaagaaaattctgatacatggtgcaaaatggatgaaccttaaaaacattatgttaagtgaaacaagccagacacaaaaggccacctattatataattccatttatataaggttgttagaataatcaattacatagagacagaaagtagaatggaggttgccaggggttagagggagaaggagtgagagttactctttattgggcagagaagtttatttaatatggtaagatgaaaaagttctggaaatggatggtggtgatggttacataacactaaattgcacgcatagaaatagttaatggtggctgggagtggtggctcatgcctgtaatcccagcactttgagaagccaaggcgggtggatcacctgagttcgggagttcgagaccagcctgatcaacatggagaaaccccatctctactaaaaatacaaaattagctgggcgtgttggcacatgcctgtaatccagctacttgggaggctgaggcaggagaattgcttgaacccaggaggcggagggtgagccgagatagtgccattgcactccagcctgggcaactggcactaccccttccctctcatgcagagaccctgtggctgaatctccctgtgtctccaagtgtgcatcactcactgtcctctgtgttgtatccacagcctcatgcagcccgtgacttcagagctaggacactgctcaggagtcttcccggaggctccctgtcttcccatttttgtgcagcctgactggggggaggcttggcttcaactggcaacttgatttagccagatttgggataggccacctgagcaccttttccatacacctgggtcccaccccaggtggagtcagggcagggcctgtcaccagggagctgggagcagagatgggagcagtctgagctgctcctccgtcatccaaggggctcctcctcccatttggggaacgttgtgggcttgtttcaaagccttggatgtttcttgcagctaatggcataggtaaaagaaaacaaaggggtaacagaaacaggggtgccatgtgttggtgacaaagaaaagcaacttgaccttgaggaccctccttcttcccccttggtgaagtcctttccatgacatagggctctggggctgacgaaggcccctctccacgtttctcaggtcagccccgaggtcagccaagagaaatcagaaaaacaggcagaagagagtctatagagataaactgggagggtttaggagaaaagttggggatttgcttgtgctgttggacacaggctgggaataaaactttttttctggctcatctctgaaagccagatagactctaccagaaaacatactgccagtgctccagggatccacttaccagagactgtgatcatcctgactgtggtcctgttgcggccagtggctgagttagtggtgtggcaggcataggatccgctgttctttgtagtgatgttggggataaagagcttttgtgtgtattgctggaatgtgccattgacagaccaagaatactgtgagggtggattagaggccgcatggcaggagaggttgagatttacccctgcatggtaataggtgtctgaaggggaaatggtgggggcatctgggccatctagagcaaaagaataaagtcacaggtgatgtcatcagagggaaggggaagctcctggtctgtggaagagccacagtgtccctctgagccaagtcacaaacctgagccaagtcccaaccaaccccaaccaaacccccgctgtttctactgagacagagtccgagacatttacctgtttctcccatcagaagatgtggactccaagtctcccatgacaggagcaccccctcccctcttattcttggtcaaggctaggcctacccatgtttgcctggggcagaaagtcatgacgagctgggtttctaggggtgggtggggaatctgcatttttggagctgagagggactgagaggcctggcctctggctgcgtggatttgggctggtggcctgggccacagaggaacagaagatactcacagaggacattcagggtgactgggtcactgaagtttgcactcgctgggttctgtatttcacattcatagggtcctacgtcattccttgtgacactgagtagagtgagggtcctgttgccattggacagctgcagcctgggactgaccgggagactctgaccatttacccaccacaggtaggttgtgttctgagtctcaggttcacaggtgaaggccacagcatccttgtcctccacggggttggagttgttgctggagatggagggcttgggagtctccgctgtgcagaaaacagagagaagattgccctgtgtggcacctttgattcctccacaggcaaatttcaattagagttggcatctcccacctctcagcctactcgagtccttaaaagcccacggtgggtgtgtgtgtcacaagacagatgcacaatgatcggggctcagagaccatgaggccgccttctctgtgtgggagaaacacagactttctcaaatgtgaattgggcagcagcgctgggttgtggacagacccaggactgggagttacagatcctggtgcctcttctggtccctccctgaccggctgcctgcctggcctacctaggggtcctcacctggaacatgtaggtgctgggtcccttccagcttcacagtcctactttgcccttcgaggtgtgtttttgagggttctgtttccaagaacattctagagatgggagatgatgggacatgccactatccttaattcctgactgggtgtttcaacagaaataacacaggggaggccggggcaagcctggaggtcggttccgtcgtcaggcagtggagccacaaggtggggcagtttttcccaggtgtttcatcgtgacttacttgagtcagtgacctctaaagatagagcagagtccaaggaatgatctagaaggagtgaaggggacaggcaagaacaggtggctttggagcagaaccttgtttcctttccttggtttttaatgtcccttctttccctgcggggggcagatgaggagctgtggatcctcccataaatacatgtggacatttgcaaatgcaaactgacgggtggggagggggagcctgaagtgctggaaatttggccctcatggaccgtgggtgtttgacagttatgagagagaaatttgggaagaagttttgcaaatattttctcctactggacattatacagagtgaaataagccactgacaggacagatactgtaggattccacttacatgaggttcctagggtagtcacactcatggaatcacgtagtagaatggtggttgctatgggctgggagtggggggaatggagagttgttcatgggtctgcagtttcagttacacaggatgaggaggttctagagatctgctgtacagctttgtgcctatagctcatatacagtgagtatttcttatgcataaggcttagggccaaaagtgttttgaatttctaacttttataaatttttgaacatttgcagtatacttactggtttagcatctcaaatctgaaaatcccaaatccaaaatgctccagtgagcatttcttttgagaatcacgttagtggccaaaaaatgtggaattttggagcatttcagatttgggatttttgatggtcaatgtgtaactctaatttgcattttaaaatttgtcaggagtttagatattatgttttgactatagtcaaaaacaaaattggaggaaacatgaatttttttccataagtagaaattgctattaattgtccacagatctaaaatcaattggtggaaggagtatttctcttgataacaaaataaggtttaggcgtcctgtgaattccagcaggatcacattatgctcaaaggaagatcctgaagttcgcttgaaattagcaactcccaggtagagggaggcacgtgagtcctgttaagaggacagaaccggtcagagaggaagtcttaggtgtgtcaattccataaagggaggaacaatgccaaattaggagaagcgatgtgtgttatgttagtaaatttagaaagcttcctgcccctaattcctatgcagagttaggcaaaattgggaggagcccaaaacaggtatgcgcaatgctttcttcattttctcttgacctcgggagacacaagtagaattggattaggtttttgcgaattggacagagtctaagtgagacgccagtggctcatgcgtctccccacctgaaggaccccatcttatcacaatggtgccatcatgaggacacagatgtgtgtggaacaggcagtaagcccatcagacagcacctgcctggccatccaggatctagtctctaaagaggttttgcatcattcattctctcattcattccctctccatgagagaacgatcgagtgtgtgtcacatgttgggcctgtcctggtgcagggtgtgagtggggagagaaagcaaagtcctctcttttgtcctcccatgggagtgacagcaacacatcaggaaacaggatttcaggttcagtgaggggggttaggatcttagagggagcctggacattcctcgcactggctctgacagttggggcaggtgatttagttctggagtacgaatgaatcagttgcttatttgctctcacttctctgagctttggatgctcaggaagaaaggatttgagccaatggatgaccatggggtccgtggaacgcaataagccctgccttcttgtggaagagaggacggggctgtggctggagagagacctcatgtgaccctgatctatccctcgtgtttgtgtgaccctggttcagtgactgtgtcttcctgtgcctccgtttcttctcaataataagcttctattaaaagaaataataggctgagcgcagtggctcatgcctgtaatcccagcattttgggaggccgaggcaggcggatcatgaggtcaagaaatcgagaccatcctggccaacatggtaaaactctgtctctaataaaaataccaaaattagctaggggtggtggcatgcacctgtagtcccagctactcgggaggctgaggcaggagaatcgcttgaacccgggaggcagaggttgcagtgagctgagatcgcaccactgcactccagcctggccacagagactccgtctcaaaaaaaaaaaaaaaaaaaaaaagaaataaaaagaattattatttctttctcaataggaaaatgatattttctgccaggttttctatgaattagcattaaattatccatagtcacctgacctgaagcttgcacagaggaggcgctcacacaaacagcacgggttattatttgcctccatgagagggtccccttggcatgatccctgctggacaagttgctgttaggaacatctttcttctatttctgtccctggggacactgaactttctatggagtctcctaagcctcccaggccagttggctgatggcctaagaagcttgtccatctgtcctctccactctgagtctcaggtgaaggacaagactctgtccttgcccagatgaggctctggggtctaagccctggctggtgagcagctccaggagccacagcccttggatggctggtaaatctttgctcctagttggccctgcccaggaggctacaacccagtgctggcacaggtttcccagggttacctggagtcaggatcctgggacaggggtctggagcaggggcttccagggatgaacttctctgtgaggatcccaggatcccagggagcccctcaggtcaggccctgacccagttctttagagtttttctcagggtcaggtccatggggagggcacggggtgcctggctgagtctgatctccttctgctgagtccccccatcagactgtcattcctctgccgtgagtgtctgcagggtctggatgcaggaaaggaattctggtctgtggaagtctgtctcccctgagtgtgtcctgcactaaatgtccaaaccctaaagtgggatgtaatgcagagagggacatgggcacagcccaggcctaacaatcctgtgtgtgggaagtagaactgacccccaacacccagaggtcatggggaatcactcacgatgtacgctgaactggccagttacttcttcactcataagatttagctttatgacttgtagggtgtaggatcctgtgtcatttctggtgacgttccgcatcagcagggatgcattggggtatattgtctctcgattgctgtatgcaggccctggggtaatctgttgatttgatattacatatcctataattcgacggttggcatccactgtttcccctttgtaccagttgtagccacgagggtcctggggcagattgtggacaagtagaagaacctccttcccctctgcagcattggatggcacagcttcaatagtgagctgagcagtggtgggcgggttccagaaggtgaaaagtgaggctaggagggggagagagcatcaagcaatattgcaacatatgtattggagtagaaaaatggggacatcagctttggagtttgtgtgtttttatgtgtgtgtatgtgtgtgtgtcctactgagtcaatgtcagcagcacagcccccatttcttcaacacctctgaccttggcatttccctggtggaatcctcttcttcagggttctgcacggctccctccacactgccctcagatcctgctcacatcagggcatccttgggagaccctttctctgacacctcctctagagacactgggtcttccctttctgacctttccctgctgtgttccttccagggctcctgtcagcgcctgacctcacattctagatctctttgtctgtcttcctccccaggagagtgtgagctctgtgagggcagggacttgtgtggtgttggctgcaccccagtgcctgggacaggcttcagactcctgtggatgagttcctgagcattccctgggccctctgcttcctgaggcttatttgccaatgtctgacattgttggctgaggacaatgtttcataccctggttatgctttatttgaagtgtcatctggtatggttattattatcatttttcaaaatgtagtggccagtgatgattaaccaggaatatggaacacttgagatgttcctgcctcttaccaattccagttcaatgtgattttcctgttgtgaccccttcccctctcttgtgtcctctcctctattaaggctccaacagaagtcctctgtcccctctcagagccccgtcctccccaggagaccccagccagtcactgtgtttcctcctcctgtcctttcccaggaagtcctctcctcacctgtgagcaggagcccctgccaggggatgcgccatctgcaggaaggggctgagatgggccccatggtctctgctgcctgcgtgttctcctctgtggagatgagcctgggatccagaaactttctgagcacggctgtcagctgtgctgtccttcctccttttgtgctgagcctcttcccggggcaggagcacttctcaggctcatgggcggggtctgtgcccaggacacctctctgtcccctcccctctcagtcctgcctccctgtccctcctttccctttattttctgtctgtgtttcaggcccctgggaattgctgaggtctctgactccttcagcagtgattctctcacccaacctctgcacacactatgcagacacacacacacagagacacacacatacacaaagagacacacacagtcacacatacaccctggagactgggtgagcacagccctgtgccctcagcatcctgcagcctatgtctccaggtcggggtgcacagtcgctccccctgccctctcccatccccatctggctcttcccttcagatcaggaggtcagcgctccgcaaggaccctgtcacagggacaccaccactgagctttggggaggtgtgtgctcactggtgagagggatcctccccctctctcattgtgtcaagcttggttgcagcttccaaggatggacattcaatgccctggatatcccagaggggactgtccttactggtggtgtgcagggcaaataatctcttatgcctcctgagagagagggctgttctggttggtcagtgggggctgtgggcctagtggtcatcagggacaggtatcagccattctcttgctctttgggttctggcagctgagctggggctcgggccttccatgttctctctgaccatcttgggtgtcctctgttttcgcccggctgactgtcctgtggtcaccccaccttccctatggttggtgcagcaggaagtggggagttgcccaggggccccacaagacagtgctctctgagatccaggagagggagcctgggacagagcaggggctcagagctggagagactcatcccaacttactctgcagccaggatgggctcagccctccccatgctgatatcccctggggtctgtcctaagggtttggacctggtcaggcccctctgtgtagagaaaggatgggcagcggccggggagcccgtctggggggacgttgctcacacctgagagggcaggtaggggtgggccatgttctgggaacaaagggagctcattccttgccccccagcttgtgtacatgagagagcgctgtcctccctcctggcttcacgaaggacagcagggggcaggtggctacatcccagacagtgcctgggcgtgaccatcacatactctccgagcctcctggggtgcagagggaaggtcatagggtgcctggctgattccccagaggcactgtgggccctcaggcagctgtggttctgtcagcgctgggctcagcctgccatgccgtagagaacaggacacacggagcaggggcgggtatttagggagcagtcacagaaagagttgatgaggatggagggaggtcacgaggggaaagcgcccagtgtggcatcccgtgcaccagcgctgccctgggagatgccttaactaggcccagggaaggattgggtgtgtggggcaggagctgcctgcagagggggcggcctcatgttgccggctgcctggctgcagggaggagctgacagagtccgtatggggagcttggagggtaaggaggacgtgggccgaggtgccctggtgagggtggaccctgctgggctgtgggttccgctgagggaggtcagcagcccctgggaaggctccaggctggagggactctgtcgccctctggtggactggaagggaagtgtgggtggccgcagtcccaggtccggctgcgtgttttattccacatggatctgcacatttcacacgaggtcacccacatgttatgtcgagctccatcacattccacatccgtgtttttctctgtggctgattctctggtgtgatctctgagcctgtgttagtcctcctcacaatggtcacagctgtgtgtggagatctaatggggtgtgtgtggctcatgtgctcacacagagtgtcctggggtcaggctttatgacctaccctgccccaactccacaacaagatctgaataatgcgccaagtaagataaagtcagaatccatgggggagggtgagagtcctggcagtgctgaggtctgtgtctccagcttaactctcagtctctttgcaaatacatttatgttgtgcatctgcagttggctgggcagtttcatgtctctgaatccttgaatctctctgtggataaggtcatgtagggactgcatgtaagtgtatgagggctatctgattagggtgggtatgttttacgtagtaggttttcttcaccaaagacttttcaaaaaattgtggtagagtgtatatatgtacattcatatatcacctccacttcctgagttcaagcgattctcctgcctcagcctcccaagtagctgggactacaagcgtgcaccaccatgccgggctaatttttgtatttttagtagaggtggggtttcaccatgctggccaggctggtctcaaactcctgaacttgtgatctacctgcctcagcctcccaaagtgctgggattacaggcatgagccactgcacccggcctgtatatcttctttgaagaaatgtctatttgagtttttgcccatttataaacggggtggtttgtctttttgttattgagttgtagcagttctttatatattctggacaggaagctcttctatatgtaatttgcaaattttttctcccattctgtgcctggtcttttcactttcttcataatgtcctttgatgcacaaaaggcttgcatcttcataaggcttaatttatctctttttccttgttgttgctcatgcttttgtgtcatatctaacaatccattaccacattcgaagtcatcaagatctacccctctttttctttttttaaaaaatatatattttatttacataggttttttggggaaccgattggtatttggttacatgagtaagttctttagtggtgatttttgagattttggtgcacccatcacccaagcagtatacactgaacccaatttgtagtattttttccctcactcccttcccaccctttttacctgagtccccaaaatccattttgtaattcttatgcctttacatcctcatcacttagctcccacttatgaatgagaacatacgatgtttggttttccattcctgagtcacttcacttagaataatagtcttcaatcccatccaggttgctgaggatgccattaattcattcctttttatggctgagtagtattccatcatacacacacacacacacacacacacacacacacacacacacacatatatatacataccaagtttctttatccactcattgattgatggacatttttgttggttccacatttttgcaattgcaaattgtgctgctataaacatgcatgtgcaagtatctttttgtataatgacttcttttcttctgggtagataccaaaagtgggattgctggatcaaatggtagttctacttttagttctttaaggaatctccacactggtttccataatggttgcactagtttacattcccaccagcagtgtagaagtgttcccttttcacaacattcataccaacatctattattttttattatggccatcgttgcaggagaaaggtggtattgcattgtggttttgatttgcattccctgattattagtgatgttgagtatttttatatgtttattggccatttatatatctttcttcaagaattgtctatgcatgtcctttgcccactttttgatgggattgtttgtttgttttttccttgctaatttgattgagttcattatagattctagatattagtcctttgtcagatgtatagattgtgaagattttctcccactctgtggggtgtctgtttactctgctgactgttccttttgtcgtgcaaatgctctttagtttaattaagtcccagctatttatctttgtttttattgcatttgcttttgggttgtcatgaactctttcctaagccaatgtctagaagggtttttctgatgttatcttctataatttttatagtttcaggtcttagatttaagtccttatcaatcttgagttgatttttgtataaggtgagagatgaggatccactttcattcttctacatgtggcttgtcaattattccagcaccatttgttgaatagggtgtcatttttccacactatgtttttgtttgctttgtcaaagatcagttgactgtaagtatttgggtttgtttctgggttctctgttctgttctattgtttcatctgcctatttttatactagtaccatgctgttttggtgactatggctttatagtatagtttggaatcaggtaatgtgatgcctccagatttgttctttttgcttagtcttgctttggctgtgtgggctctttttggttctatgtgaattttagaatttttttttctagttctgtgaagaataatggtggtattttgatgggaattgcattggatttgtagattgcttttggcagtatggtcattttcacaatattgattctacccatccatgagcatgggatgtatttccatttgtttgtgtcatctctgatttatttcaggagtgttttgtagttttccttgtagagatcttttaccaccttggttaggtatattgctaagtatttttttccagtattgtaaaaggagttgagttcttgatttgattctcagcctggtcactgttggtgtataggagaactccatcacattccagacccatgagtccgtctctgtgattgcaagttcactgccctgcctctttcacagtcagatgttccaaatgcagattttgtgtcaccttctgtgagtttgtgtttgtgtgcagtaggttgtactgtgtatgcccggggtgcaatgatgccttgagctgagcactgggcaggggtttgggagcagaagagggaggtgcagggcgggaatatcaatgttaggggagcagggggagcagggacaaatcatcttcatttcttgttgtcagggacaaattctggggcacagcacctggttctggggcacagcaacccactgtttgtgttcctgggtgttgtgagtgctcataatttcatgtgtccttggcatccatttcttaaggtgtaagcttaactgcctcatatcagaggcaggacttggtcaccatgacagtttccaatactgtacccggtcaaaaaggctccagttggtggccagagataaaatcttagaggcatctctcctgggctcccctccctccagctgcttcctttaaactgatcattctgacatttgtcctcaaatttaaagtgaccacctctcagtcacagtatgatctccttgacccagtgttcacttgttttaaacctgtccattaaagctccctgttgtaaacctgtcggataactctgtggacccagtaaagccactggcttacaggactcttctctcctccctccctgggctccctgacctctgtgtctgtggtctccaggtgtgctgtgtgctcccccatgtctgtaagtagtaaaactcttacactttattttattattattatttctaattttttgagacagagtctctttctgtcacccaggctggaatgcagcggtacaatctctgctcatggcaacctctgcctcctgggttcatttttgcctcagcctcgcgagtagctgggattacaggcttgtgccaccatgtctggctaattttttgtatttttagtggagatggagtttcattgtggtggccaggcgggtttcaaactactgacctcaggtaatccacctgcctcttaaagtgttgggattacagacatgagccagtacacctgtccagaactcttacacttttacattgtggttgtgtcactcactgaagcctcacctgccatctggggcctgacatcgaggctgacccaagggacccatgcaggttgagcccctgctggagtgcttttcttgaggccttggtgctgctggggacaggagctgccagctaatttgatagagaacctgaagagtttcactcaaaaccctgggctagatgatgtatttctgggcttgggctgctataacaaacaccatagcctgggtgacttaaacaatagagatctatttctcatcgttatggaggctgggaaatccaaggtcaaggagacaggtgactcagccctggtgagggcttccttgcagatgcctactttctttgtgtatctgcacatggtgcgggtttttgaaggggtggagagacagagcgagggagaaggagagatgccattctcttgtattttccttttattataaggggattaattccatcatgaagcccccagctttatgacctagtcattctctaattacctcctaaagaccccacctccaaattccatttcattaaggatgagagtttcaacaattttgtgggggacacattaagtttcttttttcttttttttgagatggagcctcactctgtcatccaggctaaagtacagcggcatgatcttggctcactgccacctctgtctcccaggttcaagtgattctcctccctcagcatccccagtagctaggattacaggcatgcactaccacgccttggctaatttttgtatttttagtagagatggggtctccccatgttggccaggttggtctcaaacttctgacctcaaatgagccacttgccttggtctcccaaagtgctgggattacaggctgacttattcagtttctagcaggggaggtgagagctgctttccctcctgttcatgggacctggccttttctgctgagatggcttcacactcataatctcaccctaggctgcagacccacagagcctgtgtcctcgactcctctcctgcccattcctgggtattccttcctgcaccacgttctccgtgtggccccacctgctctcgttccagggagctgcccctgggttgctgcccctctcaccatctttgggctcactggcctctgccatttcttctgagccctgaacactgatccctggcagggaggaagtgtgaagctggaatgggtgctgtccaaggtgctgctctctgtggacagtttgacagtgagggaacctgatgtgtcaccccagaggaggcccaaaagctgtttctcaggggtgcctggattgtagtggggtgggtacattagagtgggctggaccatggactgcagggaacctgttctgtgtcagcgaccagctcctcaagctccatgttattctctgtaactgactgccttgtgtgctccctgagcccaagatagattccttcccacaatgtccagagagtcagagctgtgtttggagacctaatggggggtcttgtgtgcttacacagagtgtccagagaacaggcttcatgacctcccctgccccacccccacatcaaggtctggatagtgggccaggtcagataaagtcagaatccatggggagggtgttgtcctggcagtgctgaggtctgtgcccccagcttaattctcagtctctttgcaaatacatttaagttgtgcatctgcagttggctgggcagcctcatgtctccaaattcttggatctccctctggataaagtcatgaagggtttgcatataagtatatgagggctatctgatcagggtgggttttacatatacatatatgatacatatttacaaatatgcataatacatttattatgtattatgccattttaaccactttaaaatgtgcaatcaaatggaattaaccaccatcaccactatctttcctagaaatttctcatcattccaaactgaaacgctttatctttttttttttgttttgttttgaaacaaagtctctctctattgcccaggctggagtgcagtggcgcgatctcggctcactactacctctgcctcctgggttcaagcgattctcctgcctcagcctccagagtagctgggattacaggcgtgtgccaccacgcccagctaatttttttgtatttttagtagagatggggtttgaactgttttggccaggctggtctcaaactcctgaccttgtagtctgcctgcttcggcctcccaaagttctgggattacaggcttgagccaccgcgcccggccaaccgtgtatcttttaaacaataacttccgattttgtccaccctagacctcggtaatctctagtctgctttctgtctctatgaatttgcctattcttgatgtttcatataagtggtgtcatacacatatgtcattttgtttctggcatatttcaatagcataatgtttccgaggtccatccatgttccagtgtgcgtcagagttttgttcttctttatagctgattaacttgctgttgtatgtatcgccatatttgtttatctattcatgtgttgatggacacttgggttgtttctatattttatctattgtgaatagtgctgcaatcaacattcccattcaagtacttctttgagtctctggattcaattttttgggtatatacctaggaaaggatgttgttttatatgggaagtctatgattagctctttgaggaagagcacaactgtttctcatagtggctgtacctttttgtattctcaccagcaatgtataaggattctaaattctacataagtctcccacttgttatttaacattttaaaagaatggtaactattcccctaatgactaatgaagttgagggtcttttcatgtcctcaactatttgtatatcttctttgaataaatgtctatttgagtccttttcccatttataaattgggaggtttgtctttttgttattgagttgtagcagttatttatatattctggacatgaaacccttgtctataagatttgcaatttttttctcccattctgtgtctggtcttttcactttctggataatgtccattgatataaaaaatacttgcatcttgataaagcccaatttatctatttttcatttttgtgtctcctgcattcatgtcatatctaagaatttattgtcacatttgaggtcatcacgattcacccctacatcttttctaagacatttttatggttttagcttttatatttaagtcactgatcaattttgaggtaattgtatgatatggtgggatgaagagttccataagttgtttttcatgtggttatccagttgtccctaaaccattatttgagaagactattcataccccattaaattatcttgacactcttgttaaggagcaattgaccataagtatgagggtttatttccggactctgagttctatcccattggtctctgtgtgtatccttatgccagtagcacacccttttaataattgtactgttcatgagatttcaaataagaaagtacaagtcctccaatttattttggcaagattgttttggctatttaggggtacttttttttttttttttgaaaaacaactaggtcaatggttcacaattggggaaggcttttctctttcctcctggagggaatttggctgtctagagacctttttaggaacctaatctaaatagataaattatccccacttcccttgctgaggtgttgtgttaaagtgtgcattgcctcctgtggaaaaattgagagatcctggaagcacttggccatgtggtgagggacagcaagttccatgatgatgggcagagacgacatcgtttggaacacagtgttgttggaggagctgtatgcatctctacttctttatttctctgtacaacccacatctccaccagacacagtagatattaaaatcattgtttatcctctggtgcacggatcttggctgacctgtcagcaggagctagaagtgatacctggcaaggcaggggaggagcagggctcagcagggtgaaagcagctgggacccagagaagccagaaaggtctgactcttagaaactaggggccaggaagtgggtgtcctcaggggcaaatggatcacagtggtacccattgcagtggactggaagaaggtaagagacactgggtatcctatgtcctctcttagctccctaactgaagatttggggcctgggctggttgtgtcctgtagcaggcagcgggtagacagggatggctgcatatcaggccacagtctatgtcatcttgtcaggcattgtcactgcagatggagaattctgttcagatgcctggcctgggcacatgtaagggaccaccttattcttttaaaattattttaagaaaacaatatcagcaaatgtgatcaatgtttatttttctagaatcattattaatgtcatgttttacaacatgtctcttagggaaatggtgagaaccgtgaacacaatgtgtgttttaagtggactctcctataatttcaacttttatacattcttatagaaactattttctctgtgaacacaaaggtaatatccctgtgttcatttctacttggaactctgtattcagggtggagcgagttacatttccccataaaagatggaaagcatttgactaccagaaaaagtgtctaaaagctgctggtaatgattatagggctgcaggtggaggtcagttcaagagaggtgagggaaactaatgttgagtactttttctcaaaataatgtgcagaaggaacaaccttggcccacctcatgttgggatgaatgagggacagaaatagaggtcagtaatttaaagatcaaattcaagagtgggcaacaggtttgagattggaatgggtgtgagaggtggacggatgaatggtgaagatgttcaaaacaccttcctaccccatattgagcccctgaggttgagacagtgtccagagcaggggcagcagaatgctgtgagctcacagggctggcatgagactttagcacagtctagctactacgtctattttgggatggattcatatttaaggaataatctaacagtatacaattttgaaaatatatagaaattcctttgctatgaatttcttcttcataagatatttcttcttaatgagagaattgatttttttttgagatggagtcgcaatctgtcacccaggctggagtacagtggcatgatctcgactcattgtaacctccacctcctgagttcaagcgattctcctgcctcagcctcctgagtagctgggattataggcatacaccaccaagccaggctaatttttgtatttttagtaaagacagggtttcaccatggtgatcaggctgatctcgaacttctgacctcgtgatccgcctgccttggcctctcaaagtgctgggattacaggcatgagtgaggtggactgtagaccctttcgatttgtggttacagacccttggaaaagcctcacgcttcctgctgtgaggtacaggtagtcatgtggcatcacctctaaacgtgtcttctcctgagacatcaagtttctgattaagtcaaaatcatttcaacagatattgaagatgtcagttttactctcacactcacaattcttctaccaagagatgaaagattttactggtgacttgtttgtagatattaagatagatcagtgatttggacgggaaattttgccctccagggggcatctggcaatgtccggagacattgttggttgtcagagctgggggagagcccacaaatggtgctgaacatcctagagctcacagacagccccaccagcatgaccaccccaaatgtcattgctgaggagtggagagccctgcggtgcccttcctcagcttccctggggcttcctctcacctgcttctcccatctctcccgaccactccttcacctcagttccatcgttgcccaacagtcctctccacctgaacttgctcttagtccaaggccagccctgatctctcaactctcctggcttccttttgctccttagcaggaggtgcccactagagggcgcactcgcccttcccggcactcaggctctacctttcctttctaagacaagcgtggctggcacaatcccagccctcaacagtctttaggtttgctcacggggcagctcttggacaggcatcaggaaccccagggaggagcctgactctggagatttttgtgcatggactggggacccggagccaccccagggcccaagtcactggggaggggctgggtccgtgcacggggccgcacactcagggtccagacactcctgccctgtgtgggtgctggggacatggccatgcgcctgtgtccctaaagcctctgtcactcaggatttgtgcctgaggaccttggctgggctgctgtgtaaacttccagatggagcctttcccagtggggcacgagtcctcccagagatttcaaggagggccttcaccaggaagaatcaggaggaatgtgacagccaccagggtgtagtttccctccagggcctgaaaagaggcacctctcttcatcatttgcccagagtatttgtactgtctccatcatgatggaatgatgccattttgcttctgttctgctaataataattttgtttctagctaatctgttgatgtagtaaaaacaattgttaacgttgctatgttaaagtgtggcattttaacatgatgttaaaacactatgttaaaccttgcatttctggggaagcaactcaaggtggtaaattctgactcattttggtcgtacttcatttgtggattttccgtctttgtttctgagtagggcctgcaattttactttttcattgtttcctggttggcctttgataagaaggttctacttccacaaaaatgagttaatgagtattgtttattttctttttctctggaagtgttgtgtaaggttgataggagctggtctttgattgttttgtagattttaaaaatttaaactgaagagattttatacttcttgtttggtgaagtaacatggacatagcataatgtctgcatgtttgtgtgtgccaatgacagccctgtccagatcaagacagagcacattgtctgcaccaagcgacactcctgcgcccctcccagccactgcaagcaccaggtcactgtcattctgatctctatcaccagagatgagttttgcctcttgggaactttatagctgtagaatcaggcttcattttcccttctgcattggctcctttcttgcaactagttgtgtgagatcatgcatgttttatgtagcaggaatccatttattttcatgttgtaaattatccattagtttgaatacaccacagttttatcccctgtattgttgcacatttggactgcgacactatttgggtcttctgaatcatgctgatgtggacgtttctacacacatattttggtggccttactcatttccttgggtgtagagaccattgcatatgctggaacttctaagattgtagattttcctgttagagagttgatcacatctaaattcccaccagcaacatctccgtgtccagttgttccaactcttgttattggcagtcgattgaattttagcctttcttatgttgttgggatgagatttcataatggttttaatatgcctttcctaaataaacaacagtgtaaatgcatcttttcatgtcgtcatgggccattacacatgttctaccatctggtgcctcttagagttttctgccatttaaaaacattgtgttgtcagtctttctcttattgttattttgttatgtaccttgggtgtggcttctttgtcatttagatagatacacatgtctgtatacgtcttgtgtatgtaggagagagggaaaattgggagccttttgaagaacagacattctcaatgtcaatgaattttatctgttgttaaaagattgtcatgtcatgtgaattagagatgtagatttatctttttttctctgtagagatattcatggtcatctcaaatcatctgctttttgtgagtatgcacacgtgtgcatatgtttgcatgtgtgcaaatattgtaattattaagtaagattttaagatgggtggctgggcattgtggctcatccctgtaatcccagcactttgggaggctgaggcaggatttgagcctaggtggtgcagaccagcctgggcaacatgatgaatccctgtctctattaaaaatataaaaaattagccaggcatgatggcatgcccctgtagtcccacccagctttgctcacttcttataaggaagatgagtttcctgttcctgtgacaatggagaacagccttcagcttggtttcctctcagctaaggagctggtttggggttttgttttagaatttggtagttgtaggttaagggttaaggtttcttgatacttggctctaacctctccttatgcctagagtgttcaacagtatgtaatttgtgcaattgctttttgtgattttggtttttatcattcttcttttggatttaaccaacccttcaccgtgtctagagtttaaaacaccttccaagttggtcaaatccaacaggagctccacattatgatgaaccaggcctctaaaatggaaaaaccccaactgcataacatcaaattttagctctagaaacacctgctggttgaaggaaataaaaatattttaacccaaagtatagtagtatagttccttgacaaattttgaggtggctgatagagggtcagcaaacagaagtggccctgcagagctgtctctcatgggaaaatttacatctgtagagaatctttattaatgcaggcaggtcttcctttatctggatctgggaaaattcttttttttttttttttattgatcattcttgggtgtttctcgcagagggggatttggcagggtcataggacaatagtggagggaaggtcagcagataaacaagtgaacaaaggtctctggttttcctaggcagaggaccctgcagccttccgcagtgtttgtgtccctgggtacttgagattagggagtggtgatgattcttaacgagcaagccgccttcaagcatctgtttaacaaagcacatcttgcaccgcccttaatccatttaaccctgagtggacacagcacatgtttcagagagcacagggttgggggtaaggttaccgatcaacaggatcccaaggcagaagaatttttcttagtacagaacaaaatgaaaagtctcccatgtctacttctttctacacagacacggcaaccatccgatttctcaatcttttccccacctttcccccctttctattccacaaaaccgccattgtcatcccggcccgttctcaatgagctgttgggtacacctcccagacggggtggctggccgggcagaggggcccctcacttcccagtaggggcggccgggcagaggcgcccctcacctcccggatggggcggctggccgggcggggggctgacccccctcacctccctcccggacggggcggctggccgggcggggggctgaccccccacctccctcccggacggggtggctggccgggcggggggctgacccccccacctccctcctggacggggcggctggccgggcggggggctgacccccccacctccctcccagatggggtggctggcctggcgggggctgacccccacctccctcccggatggggtggctgccgggcggagatgctcctcacttcccagacggggcggctgctgggcggaggggctcctcacttctcagacggggtggccgggcagagatgctcctcacgtcccagacggggtcgcggtggggcagaggcgctcctcacatcccagacggggtggcggggcagaggtgctccccacatctcagatgatgggcggccaggcagaggcgctcctcacttcctagatgggatggcggccgggcagagacgctcctcactttccagactgggcagccaggcagaggggctcctcacgtcccagacgatgggcggctgggcagagacgctcttcacttcccagacggggtggcggccgggcagaggctgcattctcggcactttgggaggccaaggcaggcggctgggaggtggaggttgtagcgagccgcgatcacgccactgcactccagcctgggcaccattgagcactgagtgaaccagactccttctgcaatcccggcacctcgggaggccgaggctggcggatcactcgcggttaggagctggagaccagcccggccaacacagcgaaaccccgtctccaccaaaaaagtacgaaaaccagtcaggcctggcggtgcgtgcctgtaatcgcaggcactcggcaggctgaggcaggagaatcaggcagggaggttgcagtgagccgagatggcagcagtacagtccagcttcggctgggcatcagagggagaccgtggaaagagagggagagggagaccatggggagagggagagggagagggagaggccaactgaatcttctaacttatatatcaaaaagaaatatttaccatccattctctaggagggctgccacctacaaggtttcatttacataacaagaccagctttgctagaaaaaaacagtttttctttcatctataacttgtcttgccactgaaacctgatttaccatcataacctgtttttggccatgcaggaatgcaagaaaataatcagccagcaaaacagtaagaatttattacactcaaggctgctggcttctgtccgtgcaatctttttaatcagatggtaaaaatcagcgtttcttccactacattttgattaatgggaatggaagatttgtttatgactagtcttcatgtagtgactctggtatactttttagtaatttttgggtgtgaatattcatattgtttaatcccttttttcccagaggtagtcttgctaactaagctctgatctttttatcttgcccaaattcctatctaagtggtctgggaagtcataccctacaaaccataaattctcagcagatgggtttcatttaaccctaaatatcatgacttactttccagtctgactctggcataacattatgtgacaaagaagatcaaaatattttaccccaaaacatgtttctttgccatgttttgaaatggtcctgcaaagctgtcctttgtggaggaaaatgtgcatctgtaaagaatctctgttaacatagctaggtcttcttcttccaggccctcccaatcctgaagaaattcggtaagagcctaccacctttttgaaggtctgaataggaaacatttgtcatctgctgtctctaagggcagccactataagacttcaaaagaaccttggtctccacaattttttatctcaacctgaacatttcctttctattgatccaaggtatttagacaaactcaaccaactgtccatcagaaaatgtttaaatttacttgtagcctggaagtccccactttgaattgtcccacctttctgaaccaaaccaatatatttcttaaatgtatttgattgatgtctcatgcctccctaaaatgtatagaaccaagccgcaccccgaccaccttgggcacaggttctcaggacctactgagggctgggtcacgggccatggtcactcatatttggctcagactaaatctcctcaaatactttacagagtttggctcttttcgtcgacagtcttttccttcatctcttttcttctgtgttgttcatgaagtggggtactggataaagtttccttgtcatattccttgtctcatcttgtcatatgcccttgagggcttgatttgtgaccaagtgggagcactcattcttggtctccattatcagcagtgtgtgatttttgagtcacattaggtgaccagccttaaaatggttgggaacccgagattttttgttttgttttgtttgttccaaatgtgtcaagctcccaggagggcttgtcataagaagtcccatccataaggggcttttgtcattccaacttctgttgtctggatagggctgtggcaacaagagtcttttgctatcctagcctattgctgggagtgaatattttattttgttggggttgggggaaagacctctacaattgcttcttcattgaagagggctattgacttgagggctatttagaatcaatataccactggaaattctaattgtctatggccagaagatggattcctgaaatcagactcctatgttaaaagtattttagagatctcttattctaaacagttggtaggaggatcaaatttcaaagaaagacacgtaatcgtgttctggctagccttaaaaattctcttgactaaatttcagagcaaaaatctgacctaaaacaaagttaaatttttttgtaagctcaaactgcttgctttagatcccctgagggagtaagaataaaagccactccaatattccatttcatggaatagttaaaattccatgctttcactcctgacctggattttgtttcaagtcaaggaaccagcctcttttgttttgatatttatgtgatttttgactttttaaggtactcatttacctctttggagatgcctcatacatccttggctaagtcttggctaagtcgtaatcttgattaaggcttattagtttcagatgggaggatacttttggtaaaaaagtttcaaaaaccagaagtttcacctgtttgtcctagctaaaatctgatagtaagaaatctgaaagtgttacatgtatttagtcagacatgagcagggcaggagagagcctcccgtcccccgcatcaggactatcaggtgactattaggtgatggtcaggcagttgttaactgtctttctaaaataataattggccacagccagtgccagaaaaaggcagtctcccaatacataggaaacacctgaaactggtgattagcagcttcccgataagttctcagaagttgggtgagtgggctcaagcatgtgcattaagaggcaaaattgcagagtttaattggtatatgaccttccagggacctttgactggtaagggaagaaagcctcaagtgatcatgcgcacagctccagtaaacacactgcacatgctcctctccgaagtgctggcaggccactgtgcgtgccgacagcccactccaaggaaagaatcaggggaggagagatgcagaccccagaattagtccaacatacaaaagcctaagtcaaatgtcaaacctcatacttgatctcttgtcacctgcttagccctcttttaagcgtactttacttcctttaatttctgctctaaacctttttaataaaacttcactcctgctataaaagttgcctcagtctctgcttctgccttatgccccttagtcaaattctttcttctgaagaggcaagaattgaggttgctataggcttgtacagatttgctgctgctaatattctttggtgccatgactcagctacatttggctgctaagcaaagaatttttaaaaagagctctattgttaaaagtcagcttaattaaaagctgattttcaagccatatatttattttatattaaatatatatcttcatatagaatatatattcctatagaatatatataggatatgtagatattcctatagaatgtatgtataggatatatagatattcctatagaatgtatgtataggatatagatattcctatagaatatataggatatatatattcatattgtatatacattcagaaagggcttgaaggcctcaaggcctttctgcttttcttttttgtatctttaaaagtttttttccagttgactgaaatctttcaaaatcatatacttagtctctctgtttctttctcaaggattctttttcagttcctttctgttcctcctttcttttgctacccttgatgctacatgaggggacctaaagaatttctaacagcctggtaccccttaaagaaaacagaaaagatgccacagactcccctgtttggaaagaaccacagtttttcctcatggaatcccaagagttgtaagtgaatggattcctctcaggtctaaaactctgctctcttttcaactgtgttgactgacctttttggcttctgggggatcagagtttactttttgttttcctttttttttttttttaatgagatggagtctctctctgtcgcccaggctggagtgcaatggcacgatctcagctcactgagacctctgcctctcaggttcaagcgattctcctgcctcagcctcccaagtagctgggactacaggcacatgccaccacacccggctaatttttgtgtttttagtgtatttttagtagagacagggtttcaccatgttggtcaggctggtctcaaacttctgacctcatgatccgcccaactcagcctcccaaagtgctgggattacagacttgagccactgtgcccggctcagagtttactttgtactgtaaaaagactcgaccttccttgtgtaatggctgctgggtcagtggtaagagctatggtttttgaggtaactaacagtggttagtcagtgattattacttcagagggctactcatctctttgcatgtttagataagaaagacatggtttaaacaactagaaaaagtccattttggcaaagtacactatggaagtgtttcacagtatgatccccatggcatattcctcttcttagggacgcgggattcagtgaaatccttgagttttaaaagtctagatgctgtcccttacaactgggtctccctttacacattgaaattattaagatctaaaaattacaaatacttcgttggccctcttctttaatgcgctcctctccaagctccctggaccagttggaaaacggagaccaaattaaaatctacatatctaaataaaatttatctccttataaaatcctatggtaaatttttatcattttggtgttaccttggcatctatttttaatcttccttgaacacacccaaattccttcttgtaaaaccttaaattctcaatctctctgtgctttgaggtatacatttgctacccattttctaaaactcagtaaagccttcctcagataaatgttaaccttttccatttacaaaggcacaatttgaattcaactgtctttttaaaaatagtgagttttactggtcccatgtttaaactcctaaaatcaaaacactaacatctgtctccctctatgtttatgtggacatgtatatatgttgtatcacatatgtgtatatgtctatacatatgtttattatttacacatggtatcaaattaatgtaaagataaatgagtactcataaattaagtaaataagctcaaatgcttttttcaatacatgtaattatagtaatcttttataaatatagttttaaaattattggtagaatgaagtagaaatgtcttaaaacaccttgaacatttaacaaccttcccaaaatcaaacttcagtttcaaaattgtcttccatggcacctggcttttcaaatatttcagatggcccctgaagtgtccaggaaagagaggtaaataggattatttgagatgtttaggtacatgggattgccaaaatgatgctcaatcttttttagattatatcttggtgaataatgctaatatatgttccaacattgtatgggatttctaaaattctaatgtctgagtatatgctatcaataataattaaggttttttttttttctttttagacggagtcttgctctgttgcccaggctggagtgcagtggcatgatcttggctcactgcaacctctgcctcctggtttaagtaattctcctgcctctacctcctgagtagctggaactacaggcacgtaccaccacgcccggctaattttttgtatttttaatagagacggggtttcactgtgttagccaggatgttgatctcctgacctcatgatccactcacctctgcctcccaaagtgctgggattacattcatgagccactgcgtgattgtgtttctaactgtaactaccctggacattttgctattcacagacaattgttatcttgttttaatccttttcaaagatggtttataatgagctatagaactttaacaggcactctcaaatacaagcttctgataactttggagatcataacattggaataaaggaaaatgtacaggactcataaagagcttaaatgttcaagaatatcaagcaaaacaagagttaactaaatgaactgaactcagaaagctgaagcaacatttgtttggaatattttgctgattcttgttttgcttttcagagtcaagaaaacttatttggaattatttacagcttttaacaattaagtaaggtatacacttctgtgatcaagatttggagcctgtttgtttctctctgcctggttcctctaaaatttggaaactatctgtgagtattcctatggcaatacagttgtttgaatcagtgcaataagaattcatttttcttttgcaacaggacacaattggagaaagtgattattttaccaaggctttgactggaaggctatgcttcccttgaaggagtcagtcttcacttggagaaccaataaaagccccaggaggagactggcctcatacccttgtttacacggtccctgtacagggttcatgacttatggtcagtaaagaatgtcactttctaacaggtccaggagttccaagtttattatgtgactttaagaggagaggatcacccaactcggggttatttaaggatgcaaacctatggctgggcttagctttaaaaggtcttatctgcaggaggctgaggcaggagaatggcatgaacccgggaggcggagcttgcagtgagccgagatcgcgccactgcactccagcctgggcgacagagcacaactctgtctcaaaaaaaaaaaaaaaaaaaagtctcatctgagattccttggggaacagagttccatcaaaatcaatccaaaaggcctatgtagaaataattattcttggccaggtacagtggctcacgcctgtaatcccagcactttgggaggccaaggcgtgtggatcatgaggtcaggagatcaagaccatcctggctaacacggtgaaacactgtctctactaaaaatacaaaaaattagctgggcatagtggcatgcgcctgtagtcccagctgctcaggaggctgaggcaggtgaatcgcttgaacccaggaggcggaggttgcagtgagtcgagatcgcgccactgcactccagcctgggtgacagagcgagactccatctcaaaaaacaaaaaaaaaaaaagaaaaaaagaaaaagaaatacttattcttgaaataaaagcttaacaaggttttcctgaggtgctaatctgttctttggcaaaatttctaaagggttataaaaggcttttgcttctttaaaatttatgagtcatcatttttggcaaaataaataacatagtaatctggaattctatttcataataacataatgaatatttcataaaatcttattaatcaagtattatgaatatcataatatttcataaaatcacacaggaagcattgtcacatatgaaatggtgttttgctttctttgggctatatttgtataaatatgttattggtatgtgttctaaagttatggaagactcctataattctgatatatcttagtgtacattataagtaataattattattgttatgttaaattattgtgtgacacagagttaacagatttccttgtcagttgtgtctttaactatggctaccctaaaactttttgtcatccacaaacagttgtcttgttttggtcctctttaaaaggtgattttataatcagctataaaggtctaacaggtgctcttgaatgcaggtttctgataagtttggagataagatggtgacatcagaatagaggaaaaacgttcagaactcttgaagagctaaaatgttcattaatatcaagcaggacaggaattaactgcgtgaactgaaataatagcagactggagtgatctttttaatgttttgctgaaaacattgctaatcctttgttttgctgttcagagtcaaagaaacttctcttttaagctattgacagtttttaacaatttagcatactcccatgaataaaatttggagcatatttgtttctctctacctgattttctcaataatttggaaactatctctgagtattcttaagttatggcaatatagttatttgcataagtgcaataagaatctgtcttcttttgtaacaggacacaattggaaaaactggttatttttaccaaggctttgactggaatggtagattcctttaagtaatcaaacttgacttcataggtggggctcgagcgttcattttgaaaaatgtttctgagtgattccaatgtgtagctatatttcccatcagatttatctgaatttttgtggcattcgctcctttcttttttggtattataattatttttcaggtcttatctcctctcttgggttttatgttccctggggtagggaccttgccttcttcatttctgtatctttcatgaacacatgaattggtcatcaggaaaaggttctcaaccacatgttggttgtgttctgagtctcagctttacacattagtgctagcgtcattgttctccatgagatcagaggttgcttgtgatgaaggttgtgggtaagtctgcagtgcagatggtggaggagagataccctgtttttgtatatagcattggaactaagaatattatttatatatggggtggagagtcagggatgtgtaggaagacagttctaattaggatggaggaattatactagggaattatactagggaatagatgaagtaaaggaagtaagaagtattagtaaagagaagaaatgagaacttatcaaattggccagagtagacccctgtagattcttgattaggtgaattaactagattttaggaaggtaatgagacagtcatatgcaaggaagatttcaaagtctggagacaagaagtcaagcaggacttcgagcagttgttgaggtttatgggaatggagagaatgacacaagtgagagatgttaaaaaaggatcaagagtctttggcaatgtactgaatctgagaaatgaatgagtggaggctggggataattacatttaaaagacagtgggggtacagggagcataaagaccagggagaagacctacaggaattagtgctgagaaacaagattggtggaaggaggagtagatccactcccagatacaggcaaagaagttctctccctctcccaagcatggcagtcatccttggagtaaacaggacaagaggaaaggccatcatacttgccagtcttagtgaaatgcagaaactacacctgggttgctatattagagccaccccagccagtactccagtcatgatgccgacagtgatcccagctgagaggccaggagaacttccttatcctgaagcagctgtcatggaaagaaaagaagagaataaatgaaggtgatgttattttacagtggagtgccccaggagccaactctcaggatgaagtaatttctacttgtttcttcaaggaatacattatttttgtgggaaagttgctgggaggtggttagccaactatatccttgaaatttgtcttcttctcactgtttctatgttggccatcagtcttctgtcaattctgtcctggcctttctgcactcagatatttttgaaggctttgggatatgagaaaagctgattgctattttctacatcattagaactttccaccttttcatgattgcatctttttttctcagtgtctcagtttgggcaggcatgaattagaccctgtcagatctctatggcagggacttgattgacagaaggttcaggtcagcgcattccaaattcacccactcctttgcacagagaccttgcttctcagggactcccagcaggggtatgaaagcaagcccagttctgtgagactttgttttattctcatgtgtgactggttggaggactccccatcagccttgctgaaactctcttagaactgccttgatacctaaaacttctttgtctttctccttcacaggaatcaggtctgcatcatggtctgagggctttcccaggctccttccatgcctgccccactttccctcacctgcatttttcctaataaattatcttgcatatctaatcccatcttggctgcatctcagtgggtaaaaatgaacataccaggcttgattgtttgcacttagcttttgttctttctctcccacatgtagtcagtaaccatgttctagtgttttctgtgttacctgtgcttccatatacgtatatatatgtgtgtgtgtgtgtgtgtgtgtatttacataaaataccttgtctacacacacacacacacaaacacatacacacacgcaataccttttgcatctgtttctttatttctgttgcaagcatttacttttagccctcactagtcaactcaggctggtgattaatgctatgttagttacggttgaggggcacctcctatatgccaggccctgtggtaaatactttacctgtatattatttgatttgtacaataaacctgtcaggtagacattgtttccattttacagacgaaaagctggaggcttagagtggtgaagaaactttcctgatgtcatatggctagtgaaaggcgaatctgagatttgactctaggcctcacttcaaggctaatattaatagtagtaataaagcaggtaacatttataagacatttcctctgcattttatggaaggtttcattgataattacattaaacctttagaacaatactatgaagcaagcactttcattgcaaatttcagttgaggaatcagaggctcagagaagttaaaaatcttgtacaagaaatttataactgtaaactcttacattagaaaagaagaaagatctcaaatcaacaacataatttacaacttcaggatataggagaagaacaaactaaacccagccatagtgaatgaaaaaaataataaggattagagtgaatataaataaaatggagaataaaaaaatggaagagattaatgaaaccaaaattggttcttcaaaataagatcaacaaaactgacaaccattaacttgattgactgagaaaaaagagagaagatttaaattactaaaatcggaaatgaaaatggagtctgggcatggtggctcatattttaattctagcactttcagaggtgtgtgggaggatcacttaaggccaggagttcatgaccaggctgggaaacacatgaatatccagtctgtataaaaaattcaaaacataatttgcagggcatagtggcatgcacctctagtcccagctacttgggaggctgaagaaaaaagattgcatgagcccaagaggttgaggctgtagtgacccatgattgtgcctctgcattccagcctgggctggcctatagagtgagaccctgtctctcttaggagacattactaccaattctaaagaaataatgattacaaaagtactgtgaataatgtatgccaataaattatataacctagatgaaatggacaaatttctggaaacacacaagaaaacccgagtagacatacaattagtaataagattgaaccaataaaagcatttgacaaaattcaatattctttcataataaaaacattctaactataaatggaaggaaaccacctcaacatagtaaaggtaatatgtgaaaagcccaatgctaacatcatacttaagggagaaagagtgtaagttttttctgtattatcagaaacaaggcaatgattcctgctttatctactttcattaaacatagtattgaaagtcctagtcagaaaaattagacaaggaagaaaaaagacattcacattggaaaggagtagaattatctctgtttgcagataacttgaatgtacatctagaaaactctgaagatagaaaaaaccattagaattaataaatcaattcaacaatattgcgggattcaaaatcaacgtgaaaacattagttatatttctataaactaacaataaaccatctgaaaggaaattaaaaaaaatttcaattcacattaacatcaaaaagaataaaatatttataagtttaagcaaggaggtgaaagaattctaccctgaaaactacaaaatattgctgaaagaaattaaaaatgacatcagtaaatggaaagacactttgttttcatggactagaagactcaacattgttaggaggacaatactatccaaaaacgtcagattcaaagaaatttatatcagaatcccagtaacattatttgtagaaacagaaaaatctatcctaaaattcatatggagtctcagggctctaaatagccaaacaattctgaaaatgaagagcaaaggcaaagtactcatactttctgatttcagcatttactacaaagccacagtaatcaatacagtgtgctgctggcataaaggaggacatagaaaccaatggcatagaatagagatcccagaaagaaatgcttgcatatatggccaaatgattatcaacaaggctgccaagaccattcaatggaaaaaggacagtcttttcaacaaatgatattggacaagctggatagcaatgggcaagaatgagtggaacctttatctaacaccatgtacaaaaattaacccacagtggatcaaagacctaaatgtcatagcaaaaataaaactcttagaagaaaacataggggaaaagctacatgacattggatttcacaatgattttttggttataacaacaaaagcataggcaactaaaaaaatgggtaaattggacttcatgaaaattaaaaacttttatatatcaaagaacattatcaagaaagtgaaatgaaaaggcaacccatgaagtgggaaaaatatttgtaaatcatatatctgataaggaattaatttccagaatatatgaagaactactacaaatgaacaacagcaaaaatccaaaaacccgattaaaaaatggacaaaggactaaaatagagatttctccaaggaagatatacaaatggccaataagcacatgcgaagatgctcaacatcactaatacttagggatatgcaaattaaaaccacaaggatgcaccacctcacacacattaggatagctttgataaaacaacagcaacaacaccaccaccacaaaacaagtgttttcaagtaggtgcaaaaattgaagctctattgcattgctgatggcaatgtaaaatgttatactgctgtggaaaatggtatggctgtttctcaaaaaattaaagaattaccatttgatccagcagttctgcttctggacatatacccaaagaactgaaaggaatttgaacagatatttgtacactgatgttcacagcagcatcactgacaacagccaacaggttgttgtgatgaactgaactgaaaagttaattgaaagataagtgcatagaaaactgaggtatatccatacactggaatgttattcaatcttaacaaggaatacaattcagatacgttgtgcaaaatgaaggaaccttgaagacatttatgctaagtgaaataagccagacacaaaaggacaattattagataatttcatttgtaggtggctgacgcctgtaatcccaacactttgggaggctaaggcaggcggatcacttgaggttaggagttcaagaacagcctggcccgcatgttgaaacccagtctctactaaaaatacaaaaattagccaggcatggtggtgtgtgcctataatcccagctactcaggaggcttaagcacgagaatcgcttgaacctgggaagcagaggttgtggtgagccaagattatgccactgcactcaagcctgggcgacagacccttactcttaagggtctgtcttcaaaagaaaagaaaagaaaaagatagaatagccaattacattgagacagaaagtagaatgatggttaccaagggttagggggagaaggagtgagagtttctgtttattgggtacagaggtttagtatggtgagatgaaaaagttctggaaatggatagtgtgatggttacacaacactaaattgcacacttagaaatagttaatggtaagtcttacatcgggtatacagtggctggtagtcttaccctctataaatacacactttttggtactgccctttccctcccatgcatctctgtgtgtctccaagtgtgcatcactcactgtcctctgtgctttgtcccatgtgctgtgctcacagcctcatacagccagtgacttcagaaccaggacacagctcaggagtctgccccaaggctccttttcttcccatttttctacatcctcacctaggggaaaactttgcttccactggcagctcagtttagccagattccagacaggccacctgggcaccttcttgacacaccccagccccaccccaggtagagtcagggcaaggccagtcacagctgggagcagagtctcagctactccttcctcatctgaggggctttcttctctcatttgagggaaaaatgtgagcttgtttcaagccttggatgttccctgcagctcaagtgtgggtaaaagtaaacgaaggggtgcacagaaaaggatgtgttggtaaaatagagaagaaacttgaccttgaggaccctccttcttccctctctgtaaagctccttccactacattgggcttggggctgatgaagcctccttcctacgtttctcaggctggacctgagttcatccgtgagaaatcagtaaaacaaaaggaagagtctgtagagatgaattgggaggggtcaggagaaaaatttgggatttgcttgtgcccatgggacacaggctgggaataaaaatgttttcctggttcttctcagaaagccaaatagacttcacctgaaaacctgttgccagtgctccccttaccagtgactgtgatcttcttgatcgtgaaacacctgctgtcagtggctgagttgcgaacgaaacagatgtagattccactattctttttagtgattttggagataaagagctcttgtgctgatttttggaacttcccattaatctgccaagaatactgtgggggtgggttagaggctgtgttgcaggagaggttgaggttttcccctggatggtaataggagtaagagggggaaatgttggggtcgtctgggccatctggagcaaagaaaatagagccaaaagtcatgtcatcagagggaaggaaaagctcctggtctgtggaagagccacagtgtccctctgagccaagtcacaaccctgaagtcccagccaaacccccgctgtggtcactgagccagagtctgagaattcacctgtttctcccattacaagctgtggaccctgaggtctcccatgacaggagcagcccctccccttggattcatggtcaaggctggacctacccaggtttgcctggggcaggaagtcatggccagcctgggtgcccaggagtaaaggtctctgtacttggacctgagagggactgagaggcctggcctctggccatgtggatttgggctggcagcctgggctacagaggaacagaagatactacagaggacattcagggtgactgggtcactgtggttggcactcactagattccggatttcacattcatatgttcctgcgtccttccttgtgactctgggtagagtgagggtcctgttgtcattggacagcttcagcctgggactgaccgggaggctctgaccatttacccaccacaggtaagttgtgttctgaatctcagtttcacaggttaaggccgcagtatcctcattctccacggggttggagttgctgatggtgacgaagggcttggatagtttcgctgtgcagaaaacagaagattgccctgtgtggcaacttttatcgctccatggacactttttgatcagagttggaatttcctgtctctcagcccaattgagtccttgaaagcccatggcaggtgtgtatgtcagaaaacagatgcatggcaatctgagggctcagagaccatgaggccacctgttctgtcttagagaagcatagactttctgaagtgtaaattgagcagcagtgttgggtcatggactgacacatgaccaacagtcacagcccctggtgtctctcctggtttctccctgtccagctgactggctggcccaacttagggtcctcacctggaacgtgcagctgctgggccccttccagcttcagttctactttgccctcctaggtgtgttttctctgtgacttctctttcaagaacatcctagagatgggtgttgatagactttccattgtccttaaaccctgtggatactgggtagcctggcctggaactagatgttttcagcagaaataacacaggggagaccaggggcaagcctgaagatcagtttggtcttcaggcagtggagccacaagtcagggcagttttcctgagatgtttcatagtgactgacttgagccagtgacccctaaagatagaggagagtctaaggaatgatctagaaaaagtgaagagaacagaaaagagctggtagctttggatcagaatcacgttccctgtcctgggtccttgatgctttctctccccctgcaggtgaggaccatgtggatctttctagaaatatatgtagacattcgcaaatgcagaattgactggaggaaaaggggagcataaaatgctggaaatctggccctcatagatcatgtttatttggtggatatgagacagaaatttgggaagaagttttgcaaatgttttctctgattggacattctactctctgattccatgagtttgactaccctagggacctcatataagtggattccagagtacacttctattatgatttgtttttaataaatggggtctggagagagaaaaattatgctttaaaagaaattctatagtacatctgttgttggttgttcttgagttttattctgcagtttggaccaaatcatagattcttagtgggcttcaggttcccaaactaaagctttcaaaactttacctttaaaattgggaattgtactcttcatcctagtagtcattatttaccttatactatgctgttaacttaaatactgaaactgtaaatgagagtactaatgccttggtcatgcaagccttggagctttagcgtggctcacatgagtatgcttagacagctgcaaagtggtttcactcctctcaccttgggatcaactcccattcccactatgtcccctgtcagcaggaagccagagcaattgatgacctttttctatcttcatagcctacaccttaatcttaaagtgtcttaaaactcagaggaagggattgaagatgcctttgcaaagttatgactgaaacagtgaaagagatctaactgaatcaaccccatcttgcttctgacctttaagctgttcgtgttccttcctgggtataggcagaaccactttgggaggaacttggtttatagtttaaaacaagatgataacagctctttccccaaacaaacctccctcttgcctagggactagaatgcctttgtaggactaacaaccacaagattagaaattatggtttaggagtcacacagctggaggctacaagattttgaccctcatgtcagtgcttgaggtattttgcagaccctgcccttggtggatcagctggcaccaaccagatcaataaactggctcatctgaccttgtggcccccatgcaggaactgactcagcacaagaggacagcttcaactttccatgatttcacctctgacccaaccaatcagcactcttgactcacttgccttctcccactcaccaaattatctttaaaatctctgatgcccgaatgctcagagacttatttgagtactaataaaactctggtctcctgcacagccagttctatatgaattactctttctctactgccaatccattgtcttgataaattgtctctgtctaggcagtgggcaaggtgaacccactgggtggttacaaattgagcccatgagctttggggactgcagacctgtgcttctgactctaactccgtggtgagtcagtgtagaaactgaaaccacctttgtaaagattatgacagtgagagcaagctagcatggctgactccatctagcctctagcttcaggctggccatcctcattaattcccaggcataggccaggctaaccatgggaagaatttgtagtttaactttgaagcaatgatgataatagtcccccttaaaatttaccccctccttgctcagggactgcctttgtaaaactaatgaaagaccatgagattaagattattggagggtcccaaattttgctaaaatgtaggcatagtttctgcaattccttactgctcaggactcatgtgtacagaggtcacaagatttatgacttccttaattgcttctatagataacatcactattgtagaacctgagattggtcttttaagatgttcctcagacttttgcattttggcaaccagcataactcatccagacccatgattaatgattcatccattcatgtggcttccatccagaggcagatttaacacaaacagatcattttccccacctgcatgatttcatccccaaccagtcagcagtactcattccttagacctctgcagctgaaactatccttgaaaacctctaatttctgagccactagagaggctaatttgtacaataataaacttctgtcctcctgtttgacagtctttgcctaactaaaatcttttgtaactgcaagtcaccatctcagtaaattggttttgtctgtgcagggtgcaagaggaacccatcaggtgattataagagtggactgaggagttgctcatttctttccagtggcttgtttcatgttttggctcacggaggaagagaaccctggatggggacacagtggaagcttgttctcctggtgatctggggatattggctcatgatggagcctggcaggggtgactgctctggctgatttctgtgcctttcctattgtccaggaggtgggccaggctacagtgtgaataggaagggaacagaacagtcagccttgttagagggagtgtctggggaaggcctacgtgtgggggaagctgtgcagggtgcagtatcgtagctggaatgaagggggaggaaaatgagggacatggaggagcagagacacccatggcagtgagcagtgggggctacagtgacctaaaagacctcaaggtccaggggcccccacttccttagtccaggaccagggagccctggaaacccttctatgcccagggagcctcagtgtcacatgagatggggtggctttaggagtaggggttcatagggatagaacatgggtctcaggccctgaaggacagaaaaccagtgtggacagaaactcctaggattctgtatccagaatcaggtatctaaagaggttatagattattcattccttcattcattccctccctccttcacgagaaagcttctgagtgtgtatgttacattgggcctgtgctgctgcagggtgccagtggggagagaaagctatgacctctcttttatcctcccatgggagtgacaccaacacattgggatacaagatttcaggtccagtgaggggcattaggatctgagggggaggactggatattccttgcactgactttgatcattgaggcaggcaatttagttctggagtaaaaacttatcagttgtccatttgctctcactcctctgaggtctagataagcatgaagaaaggatttgagccaatggatgactgtggggtccccaggacccccaaatccccacttctggtggaggagaggatggggctgtggctgcagccagacctctagtgactctgatctgccacttgtgtttgtgtgaccctggttcagtgactatgcctccctgtgtctcagttttctcccagtcagataagctaaatggcaaatggtctgtggcttgtcatgttgtctgtgaatgaagtttaaattattcacagtcacctgacctaatgcttggcacagaggacgtgttcacacaaacaatgtttattattatttgcctgcatgaaagagcatatctaggcctgatccatgatgaacaagatgctaccaggaacatcttctctcttctgtttctgcccctgaagacattgaattatctacggagtctcttaagtctcccagggcagttggctgatggcctaagaagcttgtccatctgtcctctgcactctgagtctcaggtgaaggactaggctctgtccatgcccagatgaggctctgggtgctgagccctggctgttaaacagctccaggaaccatggcccttgtacagctggtaaacctttgctcccagtcagccctgcccaggaggccacaacctaaccctggcacacattcccgagggtcacatgaagtcaggattctgggaccgggttctggggctgaggcttccagggttgaacttctctaagagaatccccgagggccccccaggccaggccctgacccagttctccaaggaatttctcagggtcatgtccatggggaaggcacggagtgcttggctgagactgttctccacctgctgtgtccctcccatcagactgtccttcctctgcagtgaatgtctgcagggtctggatttggggaaacaattttgatctgcagatgtttgtctcccctgtgtgtgtcctgcactaaatgctcaaaccctaaaatgggacataatgcagagggctacacaggcacagtccaggtctaacagtcctgtgtgtttgaagtagaactgacccccgacacccagaagtcatgaggaatcactcacggtgtacgctgatctgtgcagttactttttcagtcataagatctgcctttaaaatttgcacggtgtaggatcctgagtcattcagggcgatgttccagatctccaggcgtgctttggggtatactgtctcttggccactgtatgcaggccctgggatagttacttcattgtgtattacatatcttgcaattcagtcgtcggcatctattgtttcccctttgtaccagttgtggccaagtatatcctggggcagattgtagacaagtagaacaacctccttctcctctaccgcattagatggcagaacttcaactgtaacttgggcagtggtgggtgggttccagaaggtgaaaagtgaggctaggagagagagagagagcatcagtcaacattgggacctatgtattgggggggaaagatggggccctgtgtcctgagaaggtctcttcacccctcagcctttgagtatgtatgtgtgtgtgtgtcctactgagtcaaggttagcagcatgatccccattccttcaacatctctgaccttggcattttcctgtttggaatcctcttccccaggggtctgctcggccccctccccactgccctcaggtcctgctcacatcaggcatccttgggagactcttcccctgacacctcctctagagaccctgggtcttcccttgctgacctttccctgttctgtttactccacaactcctgtcaacacctgacctcacattctagatctctttgcatgtctgtcttccttcccatgaaagcatgagctctgtgagagcagggtcttgtgtgatcttggttgcacctcagttcctgggacaggctgcagactcctgtggatgagctcatgagcgttcccaaggtcttccatgtcctggaccaatttctgaggttggaggctgaggataatgtttcatgccctggttatgtttttatttgaagtgtcatctgatatagttattattatcatttttcaaaatttagtggccagtgatgattaaccaggaaaacagaatacttaagattttcctacctcttaccagttccagttttatatgattttcctgttgtgacccctgttcctctctggtgtcctctcccgtatccaggctccaacagaagccctcagtccccgctcagagctctgtcctccccaggagaccccagccagtcactctgcttcctccttgtgttcactcccagaaagttctctcttcacctgtgagcaggagcccctgtcaggggatgcgctgtgtgcagggaggggctgagaggggcctcatggcttgtgctgcctgtgtgttctcttctgtggaggtgagcctgggatccggaaactttctgagcatggttgtcagctgtgctgtgcttcctccttctgcgctgagcctcttcccagggcaggagcgcctctcaggctcatggttggggtctgtgcccaggacacctctctgtcccctcccctctcagtcctgcctccctgtctcttttctacctttctcttctgtctgtgtttcaggcccctgggaattgctgaggcctctgcctccttcagcagtgattctctcacccaacctctacacatgctatgtgcagacacacagacacacacacaaagagacacacagatacacatagtcacacagaaaccctgtagtttgggtgagcccagttctgggtcctcagcatccagccatgtttatggctccaggtcagcctgcacagttaccccttctgccctcttccatccccacctggctcttccgttcagagcaggaggcttggactgcaccagggccctgtcacagggatctaccctcactgtgctttgggtgagctgagtgctggctggtgagagggaccctttttctcattgtgtcaatattggctacagtttccaaggatggacattcaatgacccgggtgtcccagaagagactgtccttcctggaggtgtgcaggatgaatctctcatgccttctgggaagagaggcctctgctggttggtcagtgggggctgtggtcccaggaactggtctcagccactctcttgcaccctgggttctggttgctgagctggggctgaggcccattcatgttttctctgactatctttggtgtcccgtcatctgcccagctgactgtcctgtggtcactccaccttccccaaggctgatgcagcagggagtagggggctgcccagggacttcacaggacatggctctctgagacccaggacagagaacctgggacagagcaggggctcagagctgaagacattcaatctgacttactctgtggccaggatgggctcagccctccctgtgctgacattccctggggtctgtcctgagggttttgaccttgtcaaggccctcagtgtagaggaagaacaggcagtggcagcagaccccatgtgggggtcactgctcacacctgagagggcagatggggtggaattttgggatggattcatatttaaggaatgatccaacagtagacaattttgaaaatgtacagaaattcctatgctataagtttattctgcataaggtattttttcttaataagataattgacttttcattcatagatagctaatatggcctaaaatggtgagaacatcagagtggactgtttggtgtcttgtggtgtggtttcatgctttatttctcccaccccatatctacagaattctccatattccgttttgtaatgtaactcagtgggtgtcattctggtttgtggttacagaccattggaaaacccgtaccctctctgctgcgaggtacaggcagcaatgtggcatcagctctaaacatgctttctcccgtgacatcaaattgctgattaagtaaaagtcatttcaacagatactgaagatgtcagttgtacccctcacatactcacaattctttcaccaagagatgaaggattttactggtgagttgctttgagaggttagtgtagatctgattctgtcagggccacttttgccctctgagtgggcatttggcaaagtctggagaaattgttggttgacagaactgggggagggagtcctgtggcattgagtgggtagagttcccagagggtgctgaacaccctgctgctcacagagccccattagcatgaccacccctgtgtcaatgctgaggagtgcagaaccctgctgtgcccttctttagcttccctgggtcttccccagacctgatcctttcatctttctggactgctttcccatctcagctccctccttgcaccttagttccctccatctgaactcacacttagtccaaggccagccctgatctctcaactctcttggcccctttttgctccttagcaggagggaaccactagagggcaccctcaccattcctggagctcatgccctccctttcaattttgagacaaatatggctgcttttactgtcacaactccagccctccgcattctttagctttactcaggcagcagcacctggacaggcatcatggaccccagggaggactgtcactctggagattttggtggcatggactggagacctgaagccaccccaaggcccaagtcactggggagaggctgggtccaggtgagggagcttcacacttggtccagatgcccctgcctagtgtgggcactggggacatgtccatttgtctgtgtccctaaaggtcctgtcactcaggatctgtgcctgagggctttgacagagctgctgtggagctttccacatggggcctttcccagtggagcacgagtcctcccagggatttcaaggagggccgttgcctggaagaatcagaaggaatgtggcagccaccaggtgcaggctcctctcagggcctgaaaaaagggacctcttttcatcatttgccactcatgtctgcactgtctgcatcaggatggaatgatgtggaatttcatgcaaggtcattttgcttctgttctgctaataattttttttctagttaatcttttgaagtaaaggcaattgttgacttttgggtgttaaactcacctttcatttttggggaacaaactcaatgtggtaaatcctgacttttttggggtcatatttcatttgtggattttccctctctgttcccaagtagggcatgcagttttactttttcattgcatgatattcacctccctgtgtccatgtgttctcattgttcaactcccacttatgagtgagaacatgcggtgattcgttttctgttcctgtgttagtttgctgagaatgatggtttccagcttcatccatgtctcttcaaaggacatgaactcatctttttttatggatgcgtagtatttcatggtgtatatgtgccacattttctttatccagtctatcattgatgggcatttgggcatttgggttggtttcaagtctttgctattgagagtagtgcagcaataaacatatgtgtgcatgtgtctttatagtagaatgatttataatcctttgggtatatacccagtaatgggactgctgggtcaaatggtatttctggttctagatccttgaggaatcgccacaccatcttccacaatggttgagctaatttacactcccaccaacagtgtaaaagcattcctatttctccacatcctctccagcatctcttgtttcctgactttttaatgattaccattctaactggtgtgaaatggtatctcattgtggttttgatttacattcctttaatgaccagtgatgatgggatttttttcatatgtttgctggctgcataaatgtcttctttttagaagtgtctgttcgtatcctttgcccactttttgatggggttgtttgatttttttcttgtaatttgtttaagttctgtgtagattctggatattagccctttgtcagatggatagattgcaaaacttttctcctattctgtaggttgcctcttcactctgatgatagtttcttttgctgtgcagaagctctttagtttaattagatccaattggtcaattttggcttttgttgccattgcttttggtgatttagtcatgaagtctttgcccatgcctatgtcctgaatggtattgcctaggttttcttcttgggtttttacggttttaggtcttacgtttaagtctttaatccagcttgagttaatttttgtataagatgtaagggaggggtccagtttcagttttctgcatatggccagccagttttcccaataccatttattaaataggagctttcaaccctgccacagctgcgtttatacccattctttctcactgctaacgcagtttatttcttcttcttctattgctttgttgatgaattagtccagaagtttaaataaccttttgaatgctttgggtttttaaatttgtcttctagtttattattttctacctttaagtttcttacacttttattctacttgctttgtttttcactcacttcttatttggatgattaactcatttttaatcaatgttttcagtggaagcattttgggttgtgaattccctggggcatcactgtggctgcatcttacgacttttggtagatgtagctgttagtcaagtaccaggtacttaatatgttcatcactgtgtcttgattgacccgtgctttgaaaatccccagatgtctaatttttctaatttctaaaatttatgttatagcgattacatctagatcgaactgtatacaaaatatgtgcttgagtaaaaattattcaataatatctgctaatatatgagtaagcccagtcttcataaatgttccttgtggacttgaagagaacgtctatggtgcagggtatttggctgtagtgtgccatcgtcattgcctgttgattgtgtggttgaaatgtgtatcatttgtagagattaggcatgttccttgagtactgacaaagtctttaaagtgacttattgtggacaacatggacattcacagtgttaggtggataactagcaactgtcttgaacagaacaacatattcctggacatgttccaaatgaataaaacttaaatgtcaaatcaaagccaccaaagcacctcaaagtggggaaggactttgttattgtatagccaaggaagaaaagattgatacccatgaaaatttcgaaaagagtcttcacgtcaaaaaattctctttaaggaaaacaaatactatcttaaactatttgccattataataaacaggtaatgtgctattatataaaggatactcaaaattaacaagactaaagaatagcagaaggcaaatatatgaaaatcagttcacagaagaaatgttaatgctcactgttttcaagatcatgatgtttatttaacatattagagttcctagcctgaagcaataagaaatgaaagataaatcagtggtatgaggattaaaaaactagaaataaaaccatcattaatttcaaagaataacattgtttatatagaaagattcaaaatagtctaatggaaataattagaaataataagagagtttagggagctgagtagtataagaatagactaaaatatgttaatttaacaacaaacaactagatagtgtaattaaagagaacataatagtgccagagaatataaaatatttaggaatcaattcaaccaaaaccaaaatgcacacaatctcttcagacaaaattatagcaatcaagaaacactaaagcaggccttactaaatggagaactataccatatttatgcatcagaaaaataaattttctaaagatatcaattctgtttgaattgatgtattgattacatataaataggttcaccacattgattacaaatctctgaggccaaaaagttgtaaaactttccttttgtctcaacatttattttagattcagagggtgcatgtgcaggtttgttccctgggtatattgtgtgatgctgaggtttggggtacaaatggtgctctcatccaggtattgtgcatagcactgaacatttcgtttttcatttcttgcctgctttcttccctccccctttagtagttcctagcttctcctgttgccatttttaaaaaaaaattatttatttatttatttatttattgatcattcttgggtgtttctcgcagagggggatttggcagggccataggacaacagtggagggaaggtcagcagataaataagtgaacaaaggtctctggttttcttaggcagaggaccctgcggccttccgcagtgtttgtgtccctgggtacttgagattagggagtggtgatgactcttaaagagcatgctgacttcaagcatctgtttaacaaagcacatcttgcaccgcccttaatccattcaatcctgagtggacacagcacatgtttcagagagcacagggttgggggtaaggtcatagatcaacagcatcccaaggcagaagaacttttcttagtacagaataaaatgaagtctcccatgtctacttctttctacacagacacagcaacaacctgatttctctatcttttccccacctttcccccttttctactccacaaaaccgccatcgtcatcatggcctgttctcaatgagctgttgggtacacctcccagacggggtggtggccgggcagaggggctcctcacttcccagaaggggcggccaggcagaggcgccccccacctcccggacggggcggctggccgggcgggggctgaccccccacctccctcccggacggggcggctggccgggcaggggctgaccccccacctccctcccggatggggcggctggccgcgcggggggctgactcccccacctccctcccggacggggcagctggccgggcgggggctgaccccccacctcccttgcggacggggcggctggccgggcgggggctgccccccacctccctcccggacggggtggctgccgggcggagacgctcctcacttcccagacggggcggctgccgggtggaggggctcctcacttctcagacggggcggctgccaggcagagggtctcctcacttctcagatggggcggctgctgggcggaggggctcctcacttctcagacggggcggctgccaggcggaggggctccttacttctcagacggggcggctgccgggcggaggggctcctcacttctcagacagggtggccgggcagagacgctcctcacctcccagacggggtcgcagccgggcagaggcactcctcacatcccagatggggcggcggggcagaggcgctccccacatctcagacgatgggcggcagggcagagatgcttctcacttcctagatgggatggcggccaggaagaggcgctcctcacttcccagactgggcagccaggcagaggggctcctcacatcctagacgatgggcggccaggcagagacgctcctcacttcccagacggggtggcggccgggcagaggctgcaatctcggcactttgggaggccaaggcaggcggctgggaggtggaggttgtagcaagccgagatcaccattgagcactgagtgaacgagactccgtctgcaatcctggcacctcgggaggccgaggctggcggatcactcgcggctaggagctggagaccagcccggccaacacagagaaaccccgtctccaccaaaaaaatacgaaaaccagtcaggcgtggtggcgcgcgcctgcaatcgcaggcacttggcaggctgaggcaggagaatcaggcagggaggttgcagtgagccgagatggcagcagtacagtccagcttcggctgggcatcagagggagaccgtggaaagagagggagagggagaccgtggggaggtggagaggcagagggggtgttgccattttttatgtcattgaataccctatgtttagctccctcttatcaggttatggtttttagatttttcttccggtgttaatttgcttaggataatggtctccagctgtgaacatattgctgcaaaggaatgatttttttttcttttttaatgggtgcctagtattccatggtgtgtaggtagggattccttatctaatctactcttgatggacacctagattgatttaatgactcttagacatatgaacacaactcagcctcctatacacaggagaaatgaaatttgaggtccagggacagcaaatgttaaaatacaacctcagcctcaaatgtccccaaatacacatgtttgatcacataatgtgtgggagcaactgaggtgatagcaccatcccctacttttcttggaaacataaacattggtacacaccttgtggagtaaaatttctaaatgcatgtcaaaatttaaaatatatttctctttgcctcccaaacttcactgggaagaatttattacatttgcagtaatgaaaaatgacacctaatcatagttattcactgtagtgatggtttcacagcaaaatattgagaagaacctagattttacaccagtataatgctaattaaacaggttattttatatctacacaatggaatatgatacggctgtataaaaagtagaaaatcttttggctattcatatggaaacacctccatgttctgttctgattgtagcatataaacaacctaaaatgtgatgcattttttgaactagatcttatcttaaaatgttatctttatttattttttcagacagggtcttgctctcccacccaggctgaatttgcagtggtgtgattatagcttactgtggctttgatttcctaggctgaagtgatcctcccaactcccccttctgagtagctgggaccacagtatgtgctattatgcccatataattttgtgttttgtttgtttttgtagagatagggtttcaccatattgcccaggctcgtcttgaactcctgggctcaagtgatccaccagcgttggcctcccaaaatgctggaattacaagcttgagccactacatctggccctgcattcttttttttatgggacagcagtctactcactcattactttccctatcaggggaatttttttttttttttttttttttttttgttgagacggagttttgctctgtcgcccaggctggtgtgtagtggcgcaatctcggctcactgcaaactctgcctcccaggttcacaccattctcctgcctcagcctccccagcagctgggactacaggtgcacaccgccatgcccagctaattttttgtatttttagtagagacggggtttcacggcgttagccaggatggtctcgatctcctgacctcgtgatccgcctgtctcagcctcccaaagtgctgggattacaggtgtgagccactgtgcccagcctcatcaggggatttttaacctttccatttctctactgtgggtccatgccaatgtccagatgtatttatttgtctagaattggatgttcttgtaaaaagagcggtcgaaggaatggcctcctagctgatttccaggattctaatcttcatggtctaagctgtaggtttccaaacatggatactggttagagtcaccataaggcatctaaaacctacccatgcatgtgacttcccctaagaatgtctgatttgattggtgtgtggtatgtcctgggcactggtttttaaaaaatgcttccaagaaaaatggtaattttgcagtggagcaatcttagcccagtgctcaaaattaacatccccagtaatcagtgacatggacatcttagggcatcctaatatgatggatgaataacgcgcagcatcacctctgtggtattcttgcccaaagtgcataacctgagtttaattatgagaaaaaattagaaaagcctaaactgagggttattctacaaaataactcgccaatactcttcaaaaatgttaaggtcatgaactctaaagaaattttcggcactatcccagattaaaggagactgagaggacagaacaaagagatgcaatttgtgatcctaaattggatcatggtccagaaaaaggacatcagtgggaagatagggaagatttgaataaggtctatagattcattaattgtgcagtgtcagagatcatttattattttgatgattgggtagatatctataatgttaatatttggggaagttgaatgaaaagcatttgaggactctgactatttttgggatatttttgaaagtttgaatgtatttcaaaatagaaaaaggaaaaaaaggagaagaaatcttccagatattttcatcaagttgccagagtttaagaccatttcccaagttatcttgcctaattgtcagaataatcttcctgggaatgttgtttatcatatttgtgtccttttcaaagatttccagtgacttctcttatctacaggatgaagttcccattccttatcctgccattcaaagccctcatagaatggccccttgatcaatctacttctttgatctgcattgaaggaccacattttactttatcatgtctaaacattttccaattcttttccttgttaatatagcacccttgcctgtcttctcagtctcttgagttgttctttgtcccaaggcccacttcagactctgtctcttcattgaatcctgtatggtcatttctattagaagcagctaactttccacactttgaattctggtagatataatggtgtggagtgaaacgtgagttttattttattattattatattttagaaaaaaagccaatttagtatgcttattaaaagttttccttttttagggcaggcatgatggctcacgcctgtaatcccagcactttgggaggccgaggtgggtggatgacttgaggtcaggtgtttgagacaagcctagcccacatggtggtaccctgcctccacaaaaaagtataaaaattagctgggcatggtggtccacacctgtaatcctagctactctggaggctgaggtaggagaattgcttgaacccggaagacagaggttgtagggagccaagatcgtgccactacacttcagcctgggtgacacagtgggtgagactccatctcacaaaaaaaaaaaaaggaaaaaaggtttcctttgtaaaaaaaatttttaaattttaattggagaaggattagagattaaattgatgtttgaatttcatagggattaaaaaaatttttattttaggttcagggttacatgtgcaggtttgttatgtaggtaaacccatgtcacagggatttgatatacagattatttcatcactcaggtactaagcctagtaaccaatagtaatttttttctgctcctctccctcctttcaccctccaccctctggtagcctccagtgtctgttgtttccctttgtgttcatgtattctcatcatttagctcagacatataagtgagcatgtactattcggcttcttttcccacattagtttgctaaggttaatatcctgtagctctatccatgttcctgcaaaggacatgatcttattcttttttatggctgcatagtattccatggtgtatatgtaccacatataaaagtacagtctttcattgttgggcatttaggttgattccataccttttctattgtgaatagtgttgcagtgaacatttgtgtgcatgtgtctttatggtagaataatttatattcctctgggtatataccaagtaatgagattgctgggtcaaatggtagttctgtttttaactatttgaagaattgccacactgcttcccacagtggttgaactagttgaaattcccaccaacagtgtataaacgttcccttttctccacaaccttgacagcatgttatcttttgcattttttataatagacattctgactggtgtgagattgtatctcattgtggttttgatgtgcatttctctactgatcagtgatattgggctttttttcatatgctgttggccacatgtgtgtcttttttgagaagtgtctgttcatatcttttgtctactttctactggttgttttattctttttaatttgtgtaagttcctcatagctgatagatattagacctttatcagatgcagtttgcaaatagtttctcccattctgtacattgtttattctgttgatagtttcttttgctaaaagcagaagttttagattcagaaataagtgagtctgagttttgtttccaatttttatcaggtctgatataagggacaatttattgatgtctttggatagaaggataatagtgcctactgaaagggtcattgtgaacattggatgaggtgcaaacataaaggttcccagcacatagtagcttccttcctcatcatttttgtagcccagtggtccccaaatgtgttgtgggtgctgtgaagactcttatcaaattttttttgtagagcttttaaaaaatatttgtacctggccatcactaagatgaccttgaactgaactgagtgcttagggctttaaggagttcaattgagatttgtttttccaagaacacaacaaactaaataagtgatctatggacaggaatgtaacccaatggaggaaaaagggaaggtcaatgggattctaaatgagagatagctgtgatgctttctgcacccattcctttgctctcagtcagacagcgttaaggaagtacaacttttaaaattatgtaagagaagacaaaaatctcaggactttcaaactcattacaccaaagggatagttcagcctggagactgagtcatgcaatgctaccatctttttacccagtgaacaactgttaatttacaatcttgtgtgaaagcagtgttcaatagccagacccctacaagaagacctcaggcatctctggatgactgtcctcaaattgtcctttggtgaccttgaagcctttcaagatgtatatccatccataaaacaaagacacatcaattgtaactttaggtgtgcaatctaagtccagcttctaaaatgaaagcctgttagatttcacactgataatgcttatctttctaagtacagaagaaagacaagatgagaccaattattctttactatacttgtcccttcctacctgccttgccccctttaaggagatgtataaataccaggcctcctaaaaacctttttcagagagaacttaagacatggagggtttctatgatttgtgtttttccagggtgtgccctcaagctctggcttaagaaacctcaattgattcagacacttgcctcagtcactcattatggttaacattctggtgaccattaagggatactctgagtggagttttgctcccatgttttgtgttatcaaaaatgtggatatggggacatttgaggccacagaattttactttaacatttgctgtcccaggacatcaacttccgtttctcttctgtataggagggtgttttgttcacaagtctcagagctattaaatcaacccagctgtccatcaacagtggattagatgatgaaatccatacctatgctccatggaatactaggcagccataaaaaaagaaaaaaaatcatttccttcccagtactatgtttgcagctggaggccattatcctaagcaaataacaaaggaagagaaaaccataaaccataacctagtaagtgagaacaaatattggatattgagggacataaaaatggcaaaaagagaagctaggaactactagaggggagaagcaaggaagggagtaagaaatgaaaaactaagtgttgagtgctatgcgcaatatctgggtgagaggattattcatacccctaacctcagcattatgcagtatacccaggggataggtgtgcacatgtaacctctgaatctaaaataaaagttgaagaataaagagaaaagttttacaagtttacagtctcaagaactttgtaatcaatgctgtgaaactacttatatttattcaaaagatctacttggatggaattgatatctttagaatacttattttttcggatccatgagtatggtatatttctctatttaggccttctttaatgtctgttgattgttataattttgtctgaagagattgcagtgattttggtctttggttggattgagtcctaaatattttatattttctgacactattgtattccctttacactatctagctgcctgttttttctatacagaaattaatatattttagtctattcttatagtactcagctccctaaactctcttatttctacttttttattagtctttaggatttttctatataaacaatgctattctctgaaaataatgacagttttatttctacttttccgacctttgtacctcttatttgtcatttatttcttactgcttttgggtaggaactccaatacagtgttaaataaaagttatcactgaaaaaaatgagaatgaacatttttttctgtgaactattatatatttaccctcttttctgctacattttggttatattaattttatgtgttctttatatatgagcttattatctgtttattataattgcaagatattatttgcttttcttacagagaatttttccacatgaacactctttttgaaaggttcaggtatatcaatatttctttcttggctacacaatgagaaagtctttcttcaccttggggtggtttagtggctttgatttggcttcaatttttatccatttggaacatgtccagtaatatgttgtcctgttcaagatggttaccagttatccatctaacactgtgaatgtccatgttgttcacaataagtcacttaaaagactttgtcagtactctagcaaaaattcataatctctacaagaatatgcatttgaaccacacaatcaacaggcagcaagaatagcacactacgtccatatgccctgcaccatagatgttctcttcaagtccacatggaacatttatgaagactgaactaagtcatatattagcaaatattaatattaatataaatattaatagcattgaatcatttttacccaatcacctatttagtatactgtgcaatgtgggtactattctctaaaacatgaattttaaatattaggcatttggagattttaaaagcacatgtcaatcaagacacagtgatgaacattcaaatacttggtacttgactgacagttcatttgccaaaactcgtaagatgcagccacagtggagccccagggaattcatgacccaaaaggcttatactagaaaagattgattaaagatgagttaatcctcaccttaagaagggagagaaaaacaaagcaaggagaataaaacttataagaaacctaaaagtagaaaacaataagctagaagacaaattaaaaaaaaacaagaacatgaatagacccaaaaataatgttgttgaaaaagataagttatttaaacttctggactaattcattaacaaaacaataaagaaagaaaaaagaaacagatttagcagtgagagagagtggatgtaatctcatctgcggcagaagttgaaagtttcttttcaaaatttcacaacactaagttaattgataatttaaacaaaattgacaagttcctagaaaattaggtataataaaaagtagcacaggaataaatggaaattctgacctgtcctataactatgtttaaaaaaatttcttttgtgtgtgtgacagggcctcattcctgtttctccagttggagtgtagtggtgcaatcatggatcactgcaacctcaacctcccaggctcaagtgatcctaccacctcagcctcataaggagctgggaccacaggtgcatgccaccatggctggctatttttttctatttttagtagagacagggattcatcatactgcccaggcttgtctggacctcttaggctcaagttcttccttggcctttgaaagtcctgagattacaggtgtgagccaccatacccggccccaatcttgaaattttacttaatattttaaatattcacaaacatacacaaacacacatacatacatgtggatactcagaaaaagcagatgactttgggatgatgatgaatatttctacagtggaaaaaaataaatctacatctgtaattcacaccacatgctaatcttttttttttttgagatggagtcttgctctgtcacccagtctggagtgcagtggtgtgatctcggctcactgcaagctctgcctcccaggttcacaccattctcctgcctcagcctcctgagtagctgggactacaggtgcccgctaccatgcccagctactgttttttgtatttttagcagagacagggtttcactgtattagccaggatggtctcgatctcctgacctcgtgattcacccgcctcggcctcccaaagtgctgggattacaggcatgagccgccgtgcccagccgataatcttttcacaataaaattattgagaatattcttcaaaaggctcctaattttcttcgtttcttctacatacacaagacatacagagacagatctgtgtatctactatacaacaaagaagccatagccaaggtacatatgaaaatccaacagaaacagtaagaggaagattgataacacaatgtttttaaatggcggaaaactcttaagaggcaccagatggtagaacatgtgtaatggcctgtgagtacatgaaaagatgcatttgcactattgtttacttaggaaaagcatattaaaaccattttgaaatctcatcccaaccacagaagaaaggctaaaattcaatgggctgacaatcccaagagttggaacaactctacagagagatgttgctggtgggaatttagatgtgttcagctctctaacaagagaatctataatttgtagctatcttagaagatgtcccagcatatacaatggtctctacacccaaggaaataaatgagaccaccaaaatacatgtgtagatatgtccacattaacatgattcagaagacacaaatagtgttgcagtttgaatgtgtaacactacaggggataaaactgtggtgcattcaaactaacggatatttacaacatgaaaaataaatggattcctgctgcataaatcatggatgatctcacacaaagagttgcaagagaagagccagtgcagaggggaaaatgaagactgattccacctctataaagttcccaagaggcaaaacctatctgtagtgctagagatcagaatggaggtaacctggcacttggaatggctaggtttggggaggggaggtcatgaagcctgtcacctggacactctgtgtgagtacacgggcaacacccattacatctccacacacagctctggtcatcaggcatttttagggggactctagcaagggattaggaatcatgcatgagaatcatctacagagagaaacatagagttggaggagctggttgctaacgcagagcagggtccctgttgttcacaggtctagcctagtcttaagttcccagccccactcccactcctgccatgatccaggaacctctgaaaagcagctttttccaaggacctcctccttggtaacacatcaaggtttctcactgtcaagctgtccagaaagaaaagcaacttggatagtgcccataacatctgcgccctggggctcagggctcagcagaaatggcagagggcagtgagaggagacatggtgaatggggtagggacctagggacagctgcctggaacaggagcaggtggggccacaggagaaggtggcacaggaaggaatgggcaggagaggagaggagaggaggagacaggctctgtggggctatagcccagtgtgagcctttgtgaggctatctcagcagggaaggccaggtggtgtgaacaggaggagaagcaactcccacctcccctgctaggaactgaatgtgtacactcccaaattttgaaggtttcatttttaatgtgaaggtggtggaggtggtgccaggcatggtggctcacgcctgtaatcccagcactttgggaggtcgaggcaggcagatcacctgaggtcaggagttcaagaccagcctggccaacatggcaaaaccccatctctactaaaaatacaaaaattagctgagtgtggtggcgggtgcctgtaattccagctacttgggaggctgaggcaggagaaatgcttgaacctgggaggctgatgttgcagtgagccgagattacgctactacgctccagcctgggtgacacagtgagattccatctcaaaaaaaaaaaaaaaatttggaggtggggcctttgggagataattagaataagagtcagtcataaaggtaggagcttcatgatggaattaatgcccctataaaaagtggaagacacaggaaaatgatctctctctctccttttttctgtccctccaccccctcccaaccctccaccatgtgcagatacagcaagaaagcagcatctgcaagaaagccctcaccaggaccaaatcagctgacacctcaaccttggactacccagcttcccgaactgtgaggtatagatttttattgtttaagtcaccaaggctacggtgtttttaatagcagcccaagcccaggaatacatcatctgactcactattttgaatcaaactcttcagtttctccatcaacttagctggcagctcctgtccccagcagcatcagaggccccatgaaaagagctccagcaggggctcagcctgcatgggtcccatgcggcagcctcagtgtcagagcctggatggcaggtgaggctccagtgacacaaccacaatgtgaaagtgtaagagtttttaactacttatagatactggaaagcacagggcacacctggagaccacagacactggggtcagagagcccaggcagggaggagagaagggaactgtaggccaatggctttattgggtctagggtgttattgacaggtttccagaagggagctttaatgggtgtgtttaaagcaggcaaacactggggcaagaagatcacactgtgactgagaggtggtcactttaaattggagggcgaatgtcacaactgtttcagtttaaaggaagcagctggcgagaggggagcccagcacactatgcaagagagatgcctctaagattttatctgtggccaccgactggagccatttggaccgggtacagcagtggaaactctgtgatggtgacaaacatgggaatcactctgatgtgacgcagttaaatttacaccttaaaaaatggatgccaagacaacataaacaagacccagggacaccaacagggtatggtgctgtgccccagagtcagggtcctgggttcttacccagggaagtgagaaataaagataacttttccctgctccctctctcctcccctgacactgatcttcccaccctgtacctccctcttctgctcccaaacccccacccagtgctcagtcgcagacatcactgcctgcagggcatgcacagtgcagcccattgcacacaaactacaaactcacagaaggtgatgacaatttgtgtttgggacgtctgattgtgaaagagggaggacagcgtacttgcagccacagagactgaaactggaacgtgatggaacggggctggaacgtgatggagctctgacataacagacgtgtgactttgtgtgaaatgtgcagatccatgtggaataaaacacagcctagcctgtggctgctgccgtccacatttccctcatcttccaacagaagtcagcagggtccctcccagcctggaacctccctagagactgctgacctcccttggcagggcccacaggccagcagggtccgccctcaccagggtcacttggcccatgtcctccttgctcctccaagctccccacccaagtctgtcagcttttccctgcagcccagcggccacccacctgaggccactctctctgcaggcagctcctgcccccacaccccatttttcctggggcagtgctggtgcatgtgatgccacactgggcactttcccatcgtgacctccttccatcctcatcaactccttctgtgactgctccctaaatgcctgcccctgctccatctttcctgttctctggggcattccaggcttccagaacagcatctgcctgagtgcccacagtaccaatgggaatcaaccagacaccctgtaacctgccctctgcaccctaggaggctcagagcacatgtgacggtcacacacaggcaccatctgggatttgtccacctgtcccctgctgtccctcatgaagtcaggagggaggacagagctctccggtgtgtatggggtggggagtaagcatgagctccctgggttagaacacaacccaccttcacccgccctcttaggtgtgagcaccgtcctcccagatgggctatctgaccactacctgtgcttcctctacacaaaggggcttgaccaggtccaaatcctcaggacagaccccaggagatgtcaacatgaaaagggctgagcacatcctggcttcagagtaagtcgggactagtgtctccagctcagagcccctgctatgtcccaagctacctctcctaggtctcagagagctgtgtcctacagggtccctgggcagctccccactccttgctctgccagccatggggaaggtggggtgaccacaggacaatcagccatgcagaggacagaggacacccaagatggtcagggaggacatggaggagcctgaaccccagctcagccaccagactccagggagcaagagagtggctgagacttgtccctggtgaccacgaggttcacagcccccagtgaataaccagcacaggcctctcctcccaggagacataagagattaaccctgtacacctccaggaaggacagttccctctggaacactagggtcctgaaagtttatccttggaagctgcaggaagcttgacacaattagagaaagggagggtccttctcgctagccagcactcagctcacccaaagcacagtaggggtgtcctcgtgacagggtcctggtgcagcctgtcctcctgctctgaagggaagagacagatggggatgggagagggcagggggagtgactgtgcaccccaacttggagccatgaaaatggctgaatgctgagggtccagggctgggctcacccagcctacaaagtgtgtgtgactgtgagtgtctgtgtctctgtgtgtgtgtgtgtgtgtctttgtgtgtgtgtgtgtgtctgcacataatgtgtgtagaggttgggtgagagaatcactggtgaaagaggcagaggactcagcaattctgagaggcttgaaacacagacagaaggggaaggggagggaggaaaaagggggcaggactgagaggggaggggacagggaggtgtcctgggcacagaccccgcccatgagcctgagaaatgctcctgccctgggaagaggctcagtgcagaagaaggaaaacagcacagctgacagctgtgttcagaaagtttctggatcccatgctcatctccacaaaggaggacaagcaggcagcagagaccatggtgatttcctcagctcctccctgcagatggcatgtttcctggcagaggctcctgctcacaggtaggtgaaggaaggccttcctgggagaggacgggaggaggaagcacagtgactggctggggtctcctggaaggatggggctctgagaggggacagagggcttctgttggagtctgaataggtaagaagatacagaagagggacaggggtcaaaacaaaaaaaatcacattgatctggaataggtaagaagcaggaaaatctcaagtgttttattttcctggttaatcttcactggccactatattttgaaaaatgatattaataactatgtcagatgacacttcacataaaaacataaccagggcatgaaacattgtcctcagccaccaaccccagaaattggagcgtaaaccccgggatgtgtatagcactgggaacgctcatgaactcatccacaggagtctacagactgtcccaggcactgggatgcaaccaagatcacacaagcccctgtcctcacagagctcacactctcctggggaggaagacagacatacaaagagatctagaatgtgaggttaggtgttgacaagagctctggagggagcagagcagggaaaggtcagaaagggaagacccagggtctctagaagaggcttcagggaagaagtctcccaaggacatcctgatgtgagcaggacctgagggcagtggggagggagccatgcagactcctggggaagaggattccacacagggaaatgccaaggtcagaggtgttgaaaaaatcagggtcatgcttctgaccttgacccagtaggatacacacacactctaaggtggagggttgaagagaccttctcaacacccagggtcccatcttttgataccaatagataggtccccaaattgtctgatgctctctccccttcctagccttactttgaattttctgaaacctgcctaccactgcccatgtcactgttgaagccctgctgtctgatgctgcagaggggcaggaagttgttctacttgtttatcatctgccccaggattgtcttggctacaactggtacaaaggggaccaagtggctgccaaccaccaaattataggatatgtaatcgacacttaagtaactaccccagggcctgcatacagtgatcaggagacgataaacttctatgcatgcctgctgatccataacgtgacccaaaatgacacaggattctacacccttgaagttataaagctaaatcttatgaatgaagaaataaccatacaattcagcttacgccgtgagtgattccttatgtcctctgggtgttggggttcagttctacctcacacacacaggattgtcaggcctgagctgtgccttatttccctctgcattatgtctcattttagggtttggacattagtgcaggacacacagaggggagacagacttcagcagatcagaattcctttcctgcatccagatcctggagacattcactgtacagaaaggacagtctgatgtggggactcagccggagatcagtctcagccaagcacctcatgcctcccccatggacctgactctgagaaagaccctggagctgggccaaggcctggcctgagggacaccctgggattctcttagagaagctcagccctgaaggccccagctccagacttgtgtctcaggatcctgactccacgtgaccctggggagcctgtgccaggcctgggttgtagcttcctgggcaaggcttactggaagcaaatatttaccagctgtccacaggctgtggctcctagagctgcttaccagctatggtttagctccagagcctcatctgggcaaggacagagccttctccacctgagactcagagtacagaggacagagggacaagcttcttagtccatcagccagctgccctgggaagcttagtagactccatagaaagttcagtgtccccagggacagaaacagaagagagaagatgttcctagcatcccttgttcacagggatcaggcctatgggtagcctctcatggaggcaaataataacaaatgctgtttgtatgaacacttcttctgtgccaagcattaggtcagatgactgtgaatgatttaaagttcattcaccaacaacatagcaagccatacaccacttgccatttagcttatttgactgagagaaaactaagccacagggagacacagtcaccgaaccagagtcacacaaacatgaggggcagatcagagtcacatgaccctctcctccagcagaagtgggggcttattggtttccaggaacccccaccgtcatccattggctcacatcctttcttctttggcatccaaacctcagaggagtgagagtaaatggacaaccgattagtctgtactccagaactaaatcacctgcttcagctatcagagtcagtgcgaggaatgtccagacttcctcctcagatcctaatctcccttactgcacctgaaatcctgtgtttttcagagtgtcagtgtcactctcatgggaggctaaaggagaagactttgctttctctccccattcacaccctgtgccagcacaggcccaacgtgagacacacactctagttcttgtatgaaggatagagggattgaatgaagtatccataacctctttagagactggatcctggatgcagaatcctaatataatagaaattgctggccgtacccattccctgtttctcaggggctgagacccatgttccatccctctgaacccctgcccctaaagccatcccacctcctgtgactctggagttccttggccatgggagggttttcagggctccctggtcctggtctggagcactaggtgcacctggtccctggagtcactaaggtcattgtaacccccactgctcactgacatgggtgtttctggctctctctgctcctctgtgtctctcatcttctttctccttaattttagctgccatgccctgtcctgcacagcctcctctacccttgggactccccccgacattccctctaaaaaggctgattgttctgtttcccttcctgcttacaccgtggcctggctcagctcccaggaaataggaaaggcacataaattcagctggatctgcaggccctgctaggctccatcatgaaccagtgtccccaggtcaccaggagaatgagcttccattgagtccccatccagggctctttccgtttatgaggccaacatgtggaacaggccactagacagggatgaacagctcctctatcgactcttataatcacctgacaagttcttcttgcccgactgcacagacaaaaccaatttattgagatggtgatttgtagaaaaggaagattttaattactctgtttgccaagcaggaggacagaggttattatgactcaaatcagcctccccagttgctcagaggttatagtttttcaagcatagtttcagtggcagaggtctaaggaatgggtactgctgattgctcaggtatgaaatcatgaggatggggaaaatggcctgtattttctgaatccacctctgagtggaggccacatgactggttgagccattagtcatgggtctggatgaggtcagctggtttccaggatgcaaaagtctgagaaacatctcaaaagataaatctcagtttctacgatagtgatgttttctataggagcaattaggggagtcacaaatcttgtgacctctgtacacatgagtcctgagcagtaagggattgcagaaactgcctacagtttagcagaatttgggctgctcctgtaatcctaatctcatggtctttcattagttttagaaagccagtccctgagcaaggagggagttagttttagaaagggactattatcatccttgcttcaatgttaacctataaactaaattccttccagtgttagcctggcttatttccaggaatgagcaaacacatccagtcaggatagaggccagatggagtcagccatgctagcttgctcccactgtcctaatctttgcaaaggtgatttcactctctacattgactcagcaggggggtcagaggcaggggtacaggtctgcagtccccaaagcccacgggctcctttcatccatttcacttatgactccatcctcatcctgctagctgtgaggctcacatcctccagtcatttcctagagacttctggtttcctgtcaggcctatagcaagcttgaaatttgtcactcagttctaacaacaagtaaaaagctgaacaaactcaaaaatcaacaactcttttagatcccacagagaagtgaggtctcaatgctaactgacccatatattgaagagaccaacaggcaaagacagacaacacactttacctgagcagaaacccctggcacagaaacctcagtgggaaccagtactggggtcagaaaaacctgaactgtcactaatgaattgctggagggtcagtgtgaacaagatccagagttaaacactcaggggaatggattacttctgggggtagggggacatgtttgtgactcttagcttctggagcactaccaggttcctatagtaatacccagtaaaaatcagctcatccttcctgcaggggaaggggaaaagaaaccactttgaaagatgccagtgaattctattctgggcaagacctgcctttaagagaaactattttaccagagtctaatcagctggggtttgataggagccttaaatgccctggggaaggggaaatagccaactctagccccctgtagccatcatgtcccacctaagggaaagaaaaaactgagaggcacttacagcattcacagcccaggacacagctctaatgcaataccacagaacccttccctccatggcatcactgaatgcctcactcaccacagcatcactgaatgcctgctcacccaagtttcttttacccagtacatcatgtctgatttgcaaaaaaaccatacaaggcagactaagaggcaacattagacactatgcagaaacagatgggtgacataagtagagagatggatattctaagaaagaaccaagagaagtgctagagataaaaaacactgtaagagaaatgaaaaatgcccttgataagcttttgaaagtgtgtatactggtaggcttaacacagctgaggaaaagatctttagctttatggtgtgttaatagaaacttcaaaaactgaaacagtaaagtttaaaaagagtgacaaaaaagtggaagaacatattcaagttcatactgaatattttgtattgacaatagcatattttatgttttgtagttgtgggacaactacaaaggctgtaacatacacataatgggaatactgggaccaggcagaggtggccaggtgggtgctatctgatgggcttactgcctgtttcacacacatctgtgtcctcatcgtgatgccattgccataaggtggggtctttcaggtggggagatgcacaagccactggcatcttacttagactctgcccagtttaaacgaacttaaactctagttgtgtttcctgaggtctagggaaaatgaggaaagcatttcacatgcctgtttcaggctcttccccatttttcctaagtctgcacaggaattagggatagggaggtctttctaaatttgctaatataacacacattgcttctcctaattcggcatctttcctccctttatgtattgtaattgacacacataagacttcttctttgactggtactgtcctcctaacaggaaccatgagcctctctctattcagggagttgctaatttcaaaccaccttcagcatcttcctttgagcataatgccatcctgctggaattcacagcacaccttaaccttattttggtatctagagaaatactacttccatcaatcgaacttagatatttgcactattaataacaatttctacttatggaaaaaatttaatgtttcctccaatttttttttgttactatagtcagaacataacatgagttctaaactccggacaaaattttaagggcagattacagtattacacatggagctccccaaattcaaaaatccaaaatctgcaatactccaaaattcaacatttatcagctgctgatgtaatgctccaaagaaattctcactggaacactttgaattttaaaatgttcagattcaggatgctaaaccagtaagcatactacaaatattcacaaatctaaaaaagttagaaacccgaaacacatttggtcttaagccttatgcataagaactactcagtcttaatgaactgtaggaaccaagctgtacagcagatctctagaacctcctcatcttgcataactaaaactgcatatccattgaaaaactccctattcacttcagtcccagctcctggcacccaccattctactctctgattcactctggaatccacttatatgaggtccctagagtagtcaaactcatgaaatctgagtgtagaatgtccaacaggagaaaatatttgcaaaacttcctcccaaatttctgtctcatattccatcaaacacacatggtccatgaggaccagatttccaacagttcatgttccctgtctccaccagtcagttctgcatttgcaaacatccacatgtatttctagaaagatccacatggtcctcacctgccctctgcaaagggagagggaacatcaaaaacccaggagggggaatatgtttctgctccaaagccaccagcttttgcttgtcctcttcactctttctagatcattctttagactctgctctatcttcagaggtcactggttcaagtcattcaccatgaaatatttggtgaaaattgttccacctagtggctccactgcctgatgactgaattggcctccaggcttgcccctggtctcttctgtgttaattctactaaaacatccagtcccaggctaaggacagtgaaaagtcccattgtcacccatctctaagatgctcttggaaagggaagccacagagaaaacaactgggtggtggtgggtgggggtggggggcaaagtaggactgtgaagctggaaggagcacagcacctgcacattccaggtgtggataccaaggtgggccaggcaggcagcaagtcagggagggaccaggagaggcaccaggagcggtgacttctgcttttgtgtttatccatgacccagtgctgctgctcaatttatacttgagaaagcctgtgcttctctaagacagagcaggcagactcatggtctctgagccctcagatcatcatgcatctgtcttgtgacacacacacctgccatgggtttttaaagagttgggtgggctgagaggtgggagatgccaactctgattgaaagatgcccatgggggaatcaaaggtgccacgcagggcaatcttctgttatctgcacagcagagctgtccaagccctccgtcaccagcaacaactccaaccccatggaggacaaggatgctgtggccttaacttgtgaacctgagacccagggcacaacctacctgtggtgggtaaatggtcagagcctcccggccagttccaggctgcagctgtccaataacaacaggaccctcactgtactcaatgtcacaaggaattacacaggaccctataagtgtgaaatctggaatcgagtgagtgtcagtcacagttaccctgtcaccctggatgtcctctgtagcccaggctgccaacccaaattgacatggccagaatccaggcctctcagtccttctcaggtccaagaacagagactctcagccctggatatcaaagctgtccatgactgcctgccccaggcaaattttggtaggcccagccttaaccaagaataagagaggaatgggatgctcctgtcacaggagacttgaggtccccagtttgtgatggggaaacaggtggatgtctcagactccagctcagtggacacagcaggagtttggttgggacttaaggattcttcttctttggctcagagggacactgtggcctttctacagaccaggagtattcttggcttatcaatgaaaagctccagcaatacacacaagagctctttatccccaaaatcactgcaaagaatagcggggtctatgcttgttttgtccgtaactcagccactgacctcagtaagttcacagtcaagaggatcacagtctctgataagtggatctctgcatcattggcaatatgtttttgggtggagtctatctggcttttagagatcagtgaggaaaaatattttattctcagtcaatgtccaatggacaaaaggaaatcccaaatttttctcttggaccctcccgatgcatctatatgactccctgccccttgtttttctttctcatggctgcccttgggtccagcctgagaaatatgtcgagggggctttgtcagccccagagcacttcactgagggggaaggaggaggattctcaaggccacgttgcttctctctattaccaacacatttttttttctgttacctctttgttttcttttacctactccttgagctacaaggaacatctgaagctttgaaacaagctcacactttttcccaaatgagaggaggacgccccttggatgaggaagaagcagctcagactctgctctctgctctgcttcaggctcacttggtgactggccctgccctgactccacctggtgtgagaacagggtggtggaaaaggtgcctgggtggcctgtcccgaatctggctaaatctagctgccagcagaagcaaagcctcccccaggttaggctgcagggaaatgggaagagagggagcctcagggcagactcctgagctgtgtcctggctctgaagtcactggctgtatgaggctgtgggcacagcacatgggacacagcacagaggacagtgagtgatatgcaatggaaacatttggagattaacccttgggggcagggaaggggcagtgtcaaaaagtgtgtatttgtagagagggtaaggctaccaggcaccatatatatatatatatatatatatatatatatatatatatatatatatatatatatatatatatatatatatatatatatatatatatatatatatatatatatatatatatatatatatatatatatatatatatatatatatatatatatatatatatatatatatatatatatatatatatatatatatatatatatatatatatatatatatatatatatatatatatatatatatatatatatatatatatatatatatatatatatatatatatatatatatatatatatatatatatatatatatatatatatatatatatatatatatatatatatatatatatatatatatatatatatatatatatatatatatatatatatatatatatatatatatatatatatatatatatatatatatatatatatatatatatatatatatatatatatatatatatatatatatatatatatatatatataaaataagtcttaccgttaactatttctaagcgtgcaatttagtgttgtgtaaccgttatcactatccatttccagaactttttcatcttaccatactaaacctctgtactcaatacatgataactctcactccttcccccacaacccttactactcaccattctactttctgtgtctgagtgattgactattctaactatcttacataaatgggattatataatagttgtcctttggtgtctggcttttttcacttagcatcatgtcttcaaggttcattcattttgcaccttgtattggaattttattccttgttaagattgaataacattgcaatgtgtggatacacctcatttttctatccacttatctttcaataaacttttcagttgtttccaccattttggctattgtgagtaatgctgttgtgaatggcagtgcataaatatctaatcagatttctttccattgttttgggtgtatgtccagaagtgggattgctggatcaaatggtaattctttgtttaattttttgggaaatagccataccattttccacagcagctatagcatttcccatttccatcagcaatgcactacagctccaatttttccacttacttgaagatactttttgctttgtgctgttgttgtttttatcaaagctatcctaaagtgtgtgaggtggagtatacttgtggttttgatttgcatatctctaagtattagtgatgtcgagcatctctacatgtgcttattggttatttgtatatcttccttggagaaatctctattttagtcctttattcattttttaattttttttttggatttgtgctgttgttgatttgtaatagttcttcatatattctggaaattaatcccttatcagatatataatttgcaaatatttttcccatttcataggttgccttttcacttttctcaataatgttttttgaaattcgaaagttttggccgggtgcggtggctcacgcctgtaatcccagcactttgggaggccgaggtgggtggatcacgaggtcaggagatcaagaccatcctggctaacacggtgaaaccccgtctctactaaaaatacaaaaaaaattagccgggctttggtggagggcgcctgtagtcccagctacttgggaggctgaggcaggagaatggcatgaacccaggaggcggagcttgcagtgagcggagatcgcaccattgcactccaacctggcgacagagcgagactctgtctcggaaaaaaaaaaaagaaatttgaaagattttagcttttatgaagtacaatttatgcattttcttttgttgcctatgtttctgttgttataaccaatatatcattgtgaaatccaatgtcatgaagcttcttttctttgttttcttctaagagtttggtagttttcagtcttccatttaggtccttgatccattgtggattaatttttgtatacagtgttaggtaaaggttcaattcatttttgtccatggatatccagctttcccaatattattttttgaaaagactgtcctttccccattgaatggtcctggcacacttgttgataatcatttggctatatatgcaagcatttctttctgagctctctattctatgccattggtttctatgtcctcctttatgccagtagcacactgtattgattactgtggctttgctgaaataaggaagtgtgagacttccagctttgttctttctttttaaggttgcttggttatttagggtcctgagattccatataaattttaggatagatttttctatttctgccaaaaatgtcactaaaattctggtggaaattgcattgaatctgcagctcactttgcatattgtcctcctaacaatattgagtcttccaatccatataaaatgaagtgtttttccatttattggtgttgtctttaatttctttcagcaatgttttgtagtttacggcatacaattctgttacctccttggttaaacttattcctaaatattttattccttttgaggttaatttgaaatgaaaattttttcttaatttcctttcagagtgttcattattagtttatagaaatacaactgatgttgcatgttaatttagtatccggcaacattactgaatttatttattaattcttacaggtttttttcatctttaggtttttctacatacaaggtaaagttacctgtgaacagatagataatataactactttttccaatttgaatcttttttttcttgcctaatttctttggctaggacatctaataccatgttgaatagaagtggtgaaagcaggcatccttgtcttgttcctgatcatagagaaaaagctttcagtttttctcctttgaatatgatgtttgccttgggcttttcacatattacctttattatgttgaggtgtttttttttcattcatatggagaatgttattatgaaaaattattaaattttgtcaaatgcttttagttgttcaatcttcttactaattataggtctattcagatattttgtatgtctccaggaatttgtccatttcatctagtttatccagtttattggtatacaattattcctagtatttttctaatcattatttatgtataattgatagtaatatctaaattttcctttcttttctttttgcatagagagagagacaggcttgtactctatagtttcacaccatgctggagtgcagtggcatgatcagggctcactgcagactcaacctcctgagctcaagtgatgctctcacctcagcctcccaagtagcttggactacaggtgcatgttaccatgctccgctaatttaaaaacttttttttgtagagacaccgtctccctttgttgcccagactggtctcaaactccttacctcaagtgatcctcccactatggcctcccaaagtgataggattaaaacatgagccatgccaagactttattttcatttctgattttaaataatttcaatattctctctcttctcttagtcaatctagttaatggttgtcaattttgttgatcttattctgaagagccaacttttggtttcattgatttcctctattgtttttctattgtccattttatttatatcgactctaaaccttattatttccttcattcactgtgtttgggtttagtttgttcttctcctatatcctgaagttgtaaagtagattgttgacttgagatccttcttcttttttaatatgagagttaacagttataaatttcttgcacaaaattcttaagttatctgagcttctgactcctcaattgaaaattgcagtaacagcgctttctttatactattgttttaaaggtttaatgtaatcatcaatttaaccttcagaaaaatgccatgcacgcagcaaatggttaatgttagctgctatattactactattatcattagctttgaagtcaggtaatcctagaatcaaatcttagattcacttctcactagccatatgacatctgaaaagttttttcactactccaagcctctgtcttttcatctgtaaaatggaagtaatgtctaccaggcaggtttattgtatgaatcaagtaagatacaggcaaagtacttagcacagaatccggcacataggaattgcccctcagtcatagctaacatagcattattcatcagcctgagttgactggtaagggctaaaagtaaatggttgcaacaaaaataaagaaacatacgccaaaaatgtgtgtgtgtgtgtgtgtgtgtgtgtgtgtgtgtgtaaaaggtattttatgtaaatacaaacacactgttggagaccagcctcaacaccacccgtagggtacctgaagtctggtggcgacaaaggaatgagcagagacaggttaagagttcataaaggtgggagccagggggccagttgcaaaatggaggctgcaaaaggtgccaagctctggtctccatactatttattgagtacaattacttagatctaagaagcagatgttcagggcaaaacagtgaaagggaggcagtatgtcataggtgtaatctatagcaatagcagtttaaatgaatctcctttgcgctcaaacagcatatctttaacttatcggagagtagctagtgggagtgggcttaactgggaacctgcatgtctgtccacattccagtgtttcaaaggagtgtctttctccttgaacacagtgtttatagataagaaagcaggtctcactctgaacatgggaatatgatggcaattaggaggctttcctcctcagaggcctcttgtggctttccacagcttattgtcccatatttttgtggccagtttatacaggcaccccacaatcccttttcccaacacacacacacatatggaaatatggaaaaagaggtaacacagaaaatactaggacactgttactgactacatgtgggagagagagaaaaaactaagtgcaaagaatcaagcctggaatgttagtttttaacccattcagatgcagccaatagtggattagacatggaagagaatttattagggtaaatgcctgtgagggaaaggaaggcaagtgtgagagaagcctgagagagctctcagaccacaacgcagatctgatttctgtgaaagataaagagaaagaaattttggatagcaatgcagttcaaaaagagtttctgcagggctgaaggggagtgccttcaccagtcacccattagagttacacagagtctcacagaactgggcttgctttcatacccctgctgggaggccctgggaagtgaggtctctgcaagggaggtagtgaatttgaaacgcactgacctggcccttctgtcaagcacctccctgccatagagactgacagggtctaattcatggctgccaaaactgagacactgagaaaaagatgcaaccatgaaaaggtggaaggttctaatgacatagcaaatagccatcagcctttctcacatcccaaagccttcaaaaatatctgagtgcagaaagaccaggaaggaatgacagaagactatcaccaacctagaaacatggtgagagaaggaaaaaatggcaaaaatgtggttggctaatcatctctcatcagccttcttatacaaataatttattccttgaaggaacaagtacagtactccatgccgagagctggttcttggggcaccccagtgtaaaacaacatcacttttattccttcttttattttccttccattacagatgtttcagcacagggaagttctcctgtcctcccaactaaggccactgtcagcatcatgattggagtactggccagggtggctctgatatagcagctttggtgtagtttctgcatttcaggaagactggcgggtatgatggcctttcctcttgtcctgtttcctgcagggctgactgccatgcttgggagagggacctatatcccaggactggatctcctcctcctcccaataaactcctgcttctcagcactaattcctgcaggtctcttcttccctggtctgcatgctgcctgtaccccactgtctcttagatgtgattatccccagcctctgctcatttgtttcccagattcaatacactatgaaagtcttttgatcctttcttaacatctctcacttgtgtcattctctccattcccatagacctcaacaactgcttgaattcctgcttgactccttgtctccagtatttgaaatcttccttgcatatgacttcctcattaccttcctaaaatctagttcactcacctactcaagaatctacaggggccgactctggcctattagataagtttacatttcttctctttactaatccttcttacttcctttaccaccactcccttatataattcctctatcctaattacatctgtctccctacatatgcctgcccacccatgccatatacacaagggattattagttcaaattgtatgcctaaaacagggtgaccgccctccatcatctgcactgcaaagttacccacagccttcatcacaagcaacctctgacctcatggagaacaatgactctagcattaatgtgtgaatctaagacttaggacacaatatacatgtggttgggaagctttccctgataaccaatttatgtgttcatgaaaaatacagaaatgaagaaggcaaggtccctaccccagggatcataaagcctaagacacaagataggaccttaaaagtaattataaactccggccctggaccctacagccaccaagatgttaatgcctaagaagagtcggattgccatttatgaactttttttttttttttttttttttgagacagagtctgactctgtcgcccaggctggagtgcagtggagtgatctgggctcacggcaagctccgcctcccaggttcacgccattctccctcctcagcctcccgagtagctgggactacaggcgcccgccaccacgctcggctaattttgtttttgtatttttagtagagacggggtttcactgtgttagccaggatgatctcgatctcctgacctcgagatccacctgccttggcctcccaaagtactgggattacaggtgtgagccacggcgcccagccatgaactcctttttaaggaaggagtcacggtggctaagaaggatgtccacatgcctaagcacccggagctggcagacaagaatgtgcccaaccttcatgtcatgaaggccatgcagtctctcaagtcctgagactacgtgaaggaacagtttgcctggagacatttctactggtaccttaccaatgaaggcatccagtatctccgtgattatcttcatctgcccctggagattgtgcctgccaccctacgccacaaccgtccagagactggcaggcctccgcctaaaggtctggagggtgagccacctgcaagactcaaaagagaggaaaccgacagagatacctacagacggagtgctgtgccccctggtgccgacaagaaaaccgaggctggggccgggtcagcaaccaaattccagtttagaggcggatttggatgtggacgtggtcaaccacctcagaaaaattggagaggattattttgcattgaataaacctacagccaaaaagaaaaaaaaagtaattataataccaaaatagaacaaaatgaatgccacaagaattcagataaatctgatgggaaatacagccacacattggaatcacagggaaacattttttaaaaatggatgctgaagccctcactccccataccttctgatttagtggtctggcgtgggacccaggcattgataatttttaagcttccccagatgctactaatgtgtaaccaggatggtgaactctcctgtttaaataggtaggacgtagggctaaattaatggtttttagctagatgacctagggaggtttttcaacatacataagcctatactttgttggccatatttgttaatgggctacaccgagaactcagtaatccagttaagaaacacaagctaaatggaaaagccactttatttgatatgttaaattatatgggaagcattgtcaaatgataagtttgtgaggtcatcaacttcttgtcctggtttgcagttaagtgcctctagttatggtgtcaaatattttggtgagctctgagtggcccatacctcagacatgaaggttttcccatgaaatttacattgagttgtccccctccagcttatagggcttcaggaacacagcagatcttgttcttactgattccataggagaaattgggttggagaaactagaagaattcagggtccagtccagtctacaggtggattataaaaactcaaaaacaatgaacagagctgaaatctcataaaagttgtgctacagtttttcttctcaacataatttttctctctatgggcatctctatttctaccaaagataataccactaaggcaaatttgtttgcaaaatagattgagtctcatcaaacttggcgtgtattctcaatgttaatttatgggtatgttactgatatgagtcttccaaaaattatatgagattcatagaaatctaatatcagtcataatgtcatatgccacagaagcaactagatttctatatgagccatgtctttatcttaatgaacgctcatcagatttttaaccatagttattttaaatctgtcattcatagacagttgttttgattcttcctcaaagtatttccaatcagctacagtccaaaattgcttcttgcttcaaggagatttacagaaaaggctctgacaaggattctttaatacaagtttttgatgaatttaagataccactggactgtctaagaacttccaagttcttctgataccttcatgaaattgccagccaagaccaagcaggaaaaaactcaatttcattggactaaataataataatgatgagaatgtttttatgattttttgtttggagttttgctgattctttaagtggtttgttttccagatttatggaattttttcttttaaccaatctatagcacacagtaatttgacaaagtatacttttgtgaacaaaaattgaagcatttacttttgctccctacctgactgccttagaattgggcaactattcatgagtattcatatgtttatggtaatacagatatttgcttaagttcaataaatatctgctctctttataacaggatacatttgaaaacattggttatattaccaaggctttgactgggatattacatttgaaaatataaatagaatgaaaccacagatactgcaggcaagtgtaaagtaagccttggtttggcttcctggtctcaagaggtttttgaaagtttaatctgagattccttataaaaaatatccagcaaagcaaagtttaagaagagcctatgtgatccattacaactctttctgcacttaatgtaaaggccaagtttgatgagactcaatctattttgcaaacaaatttgccttagtggtattatctttggtagaaatagagatgcccatagagagaaaaattatgttgagaagaaaaactgtagcacaacttttatgagatttcagctctgttcattgtttttgagtttttataatccacctgtagactggactggaccctgaattcttctagtttctccaacccaatttctcctatggaatcagtaagaacaagatctgctgtgttcctgaagccctataagctggagggggacaactcaatgtaaatttcatgggaaaaccttcatgtctgaggtatgggccactcagagctcaccaaaatatttgacaccataactagaggcacttaactgcaaaccaggacaagaagttgatgacctcacactgtggacagcttttcccaagatgtcaaaacaagactccccttcctgatgaggctcttgcccctcttaatttgtccttgctcatgtctgcctctttttcttggtgagataatgctgtcattagaatttcacaagaagtatcttctgagggtagcttaacagagtgttgaatctgggatgaattcattcccttatttccacataacataagagatcctttagtctacccaatggctgacattagcagcatcttttttttccttcagcaataaccacttttaatgatttagtgtatatttttataatcataaattttacttgtttgaacaggtaatgcattaacagtacaaatttcaacaggtagaaaagcgtatactgaaagtgtccctcataacacctatccctcctccatcctatcacctggtttccctctgcagaggcaaccaggaatatctgtttcttatgtcttatccagacatattctatgtgttaggttggtgcaaaagcaattgcggttttgcccgtacttttaatggcaaaaaccacaattacttttgcaccaacctaatatttacaagcacattggaaggcagctatgctccccactataccaccaacacatcttataagcacattggtctagtctttcttctttttttcaaaagtaaatggtaaacatttgaggcacactgtttgcatctggcttcttcatttaacaatacatcttgcaggtcattccacatcaggatataaaaaatctcttagtcttttaacagctgtatacttgtcttagtccattttatgttgctatagcaaaatacctgagactgggtagcttataaagaaaacaggtttatatggcttatgattctggtggctgtaaagttcaaaattgggcatctgcctctggtgagagcctcaggctcattagcagcatctttaacacagctgttttttcagatgtacagtggtcccttttagactttagaccttcagactcacctgttctcactccctgtttaatttaacccagccatgggatgctagttaataaattggccactactagctgaacaggaaggagtctgtgcagtttctgacacttcttgttgcacatggataaatacgtcggatattatagagacttagttgcaaaaattaacaaatgtgctgcttggttaaaatggctaggctcttctggctcactctttgatgtgttctattttagttggtttgcatcttgcctaaggtgcatattccaaactcttggtattatcttcctgatagtcatattagtagtctcctggtgtgttgtattctgttgtattctccaaaagtttttaaatgtttgcatgcagccatccattgaatatcaaatagtgtctctttggctggagttacaaaaactcaaagaaatgtgtgatcaggaggacattataacctatgaatgatggaagcccaaaatgatggtgatagaaaggattgctaatgtcttaagttctggtcccttagtgaggtcctagagactccaaaacagagccactcatgctaaatgctacatactccgactgaaattttaaggaagcagacagattccaaaacagaccatttttttttctgagaacaggagattccagtctacctgagtcagcataataaggaagtcacctctgctttaacttttacaaaaaaagtgacctgaagtacattgatgttaaccaatccatttctttttttttttaacttcttaaatgcacaaatttattttttctcaacaaacacacatcttaatgcctttacaacttttatctccccaaatatatcttgcttttctttatacatgctgtatacagagttgttttccttatatttagtagttattgcttttttgtgcccttttgggtcctgaatttacacatcaggcatagagcttgggacaggaaagagctgtgaagcaaattcctggaagatcaaaccccttccagcatggccaggtagcacagctgagccagggatgatggggccatattgggtttggctctgccttgcagctggcagtccaaacactgaggacatgcatatttctgcgggcctcactatggtcatctgtccaaaccccagaatccagagactcaaaacgaaatacagtcatacagtaagatatgtgcaaggtttcagggagcccagcagccagaccttacagctttagctcaatttagacaaatcaagcaagtttaagaaatattccagaagtagcagttttatgatcttaaaacatgtaataggctgggcacggtggcccacgcctgtaatcccagcactttgggaggccaaggtgggcagatcacttgaggtcaggagttcgagaccagcctggccaacatggtgaaatcctgtttctactacaaatacaaaaattagccaagtatggtggcatacacctgtagtttagctattcggaaggctgaggcaggagaatcacttgaacctgggagacagaagttgtggtgagctgagatctcaccactgcactccagcctgggcaatgagagcaaaactccagctcaaaaacaaaaaacaaattaaaaaaaaaaaaaaaaagtaatggagacaatgtaaacctgtgtgtcagtagacccaggaaaaaacaattatatttaactgacaatcctgaagcctttccaattttcttttttcttttttttttttttattgatcattcttgggtgtttctcgcagagggggatttggcagggtcataggacaatagtgaagggaaggtcagcagataaacaagtgaacaaaggtctctggctttcctaggcagaggaccctgcggccttccacagtgtttgtgtccctgggtacttgagattagggagtggtgatgactcttaacgagcatgctgccttcaagcatctgtttaacaaagcacatcttgcaccgcccttaatccattcaaccctgagtggacacagcacatgtttcagagagcacagggttgggggtaaggtcacagatcaagaggatcccaaggcagaagaatttttcttagtacagaacaaaatgaaaagtctcccatgtctacctctttctacacagacacagcaaccatccgatttctcaatcttctccccacctttcccccctttctattccacaaaaccaccattgtcatcatggcccgttctcaatgagctgttgagtacacctcccagacggggtggtggccgggcagaggggctcctcacttcccagtaggggcggccgggcagaggcgcccctcacctcccggacagggcggctggccgggcggggggctcacccccccgcctccctcccggatggggcggctggcagggttgggggctgacctccccgcctccctcccggatagggtggctggccgggcgggggcctgacccccccacctccctcccggacggggcggctggccaggcagaggggctcctctcttcccagtaggggcggctgggcagaggcgcccctcacctcccggacggggcggctggccaggcagggggctgaccccccgcctccctcccggacggggcggctaaccaatccatttctatggctctgtttactggttctcatttgacaaaatccactgttctgttattgtattgcccagggggagctatcactgtatttatagaatgagttctgccccaaatcatgaatcacaattaaaagccaatttgatctggccgggtgcggtggctcacgcctgtaaacccagcactttgggaggctgaggcaggtggaccacaaggtcaggagatcgagaccatcctggctaacatggtgaaaccctgtctctactaaaaatacaaaaaaaaaaaaaaaaaaaaattagccgggcatggtggtaggtgcctcccagctactcaggaggctgaggcaggagaatggtgtgaacctgggaggcggagcttgcagtgagctgagatcgtgccactgcactccagcctgggcgacaaagcgagactctgtctcaggaaaaaaaaagcgccaattagatttgtaactaaattaattatagatctatagtaattttgtctttcgatgcacgttcacagccagcgatggccaatggtgtctctcacgctgcatcattctcaccctgaccctcctgcctccctctttcacttacaagtacccttatgatacactgggcccactgagataatccagaataaccttcccatctcaagattcttaacctcatcacatcttcaaagtctttttgccaaatatagtaacatgcactggttccaggggtcaggatgtggacatttttaggaggccatgattctgtgtaacacacgtacccttcatgaacatcaactacaacaaaaattagctttaccttccttctgtgtctcacttttctgactgtgcataaactttaagatgaaacacagtagttctgctatgaactggctggatgaccatggaccactgacttaaattccctcagcttcttctcctctgcggtagaatgtgactctttttttttttttttttactttttttattttcttttttttattattatactttaagttctgggatacatgtgcagaacgtgcaggtttgctacttaaattccctcagcttcttctcatctgcagtagaaggtgactcttttttttttttttttactttttcttttctttttttaaaattatactttaagttctgggatacatgtgcagaacatgcaggtttgttacgtaggtatacatgtgccatggtggtttgctgcacccatcaatcgatcacctacattaggtatttctcttaatgctatccctctcttagtccgccatcccccaacaggccccggtgtgtgatgttcccctccctgtgtccatgtgttctcattgttcaacccccacttacgagttagaacatgtggtgtttggttttctgttcctgtgttagtttgccaagaataatggcttcaagcttcatccatgtcccttcaaagacatgaactcatccttttttatggctgtgttgtattccatggtatatatgtgccacattttctttatccagtctatcattgatgggcatttgggttggttccaagtctttgctattgtaaatagtgctgcaataaacatatgtgtccatgtgtctttatggtagaataatttataatcctttgagtatatacccagtaatggaattactgagtcaagtggtatttcttgttctagatccttgaggaattgccacattgtcttccataatggttgaactaatttacactcctaccaacagtgtaaacatgttcctatttctccacatcctctccagcatctgtttcctgactttttaatgattgccatcctaactggcatgagatggtatctcattgtgattttgatttgcatttctctaatgaccagtgatgatgagcttttttccatatgtttgttggtcaataaatgtcttcttttgagaagtgcctgttcatatccttctcccactttttgatggggatgtttgttttttcttgtaaatttgtttaagttccttgtagattctggatattagtcctttgtcggatggattgattgtaaaaattttctcctattctgtaggttgcctgttcactctgatggtagtttcttttgctgtgcagaagctttttggtttaattagatcccattggtcatttctggcttttgttgccattgcttttggtgttttagtcatgaagtctttgcccatgcctacgtcctgaatggtattgcctaggttttcttctagggttttgatggttttaggcctatgtttaactctttaatccatcttgagttaatttctgtataacgtgtaaggaaggggtccagtgtcagttttctgcatatggctagccagttttcccaatgccatttattaaatagggaatcctttccccattgcttgtttttgtcaggtttgtcatggttgtagatgtgtggtgttacttctgaggcctctgttctgttccattggtctatatatctgttttggtaccagtacaatttttttttggttactgtagccttgtagtaagtttgaagtcaggtagcatgatgcctccagctttgttctttttgcttacaatcgtcttggctatacgggctcttttttggttccatatgaaatttaaagtagttttttctgagaagaaagtcaatggtagcttgatggggatagcattgaatctatacattactttgggcagtatggccattttcacgatattgattcttcctatccacgagcatggaatgtttctccatttgtttgtgtcttctcttatttccttgagcagtggtttgtagttttctttgaagaggtccttcacatcccttgtaagttgtattcctaggtattttattcactttgtagcaattgtgaatgggagttcactcatgatttggctctctgtttgcctgttattggtgtgtgggaatgcttgtgatttttgcatattgattttgtatcctgagactttgctgaggttggttatcagcttaaggagattttgggctgagatgatggggttttctaaatatactatcatgccatttacaaacagagacaatttgacttcctcttttcctgtatgaataccctttatttctttctcttgcctgattgccctggccagaacttccaatactatgttgaataagagtggtgagagagggcgtccttgtcttgtgctggttttcaaagggaatgcttccagcttttgcccattcagtatgatattggctgtgggtttgtcataaatagctcttattattttgagacatattccatcaacacctagtttattgagagtttttagcatcaaggggtgttgaattttatcgaaagccttttctgcatctattgagataatctgtggttcttgtcatgggttttgtttatgtaatggattatgtgtattgatttgcatatgttgaatgagccttgtatcccagggatgaagccgacttgatcgtggtggataagctttttgatgtgctgctggattcggtttggcaatattttattgaggatttttgcatcgatgttcatcagggatattggcctgaaattttcttttttggttgtgtctctgccaggttttggtatcaggatgatgctggcctcataaaatgagttagggaggagtccctgtttttctattgcttggaatagtttcagaaggaatggtatcagctcctctttgtacctctggcagaatttggctgtgaatccatctggtcctgggctttttttgcttagtaggctattaactactgcctcaatttcagaacttgttattggtctcttcagggattcgacttcttcctggtttagacttgggagggtgtatgtgtccaggaatttatccatttcttctagtacctttttaaactaaaaacatattttactttttataatatactttgcatatagggttgttttgtctatatctgttttaatcacatagtgtgattacataataagctcctagtaaccctttgatatggtttggatctgtgtctttgcccaaatctcatatcaaattgtaatctccaatgctggaggtggggcctggtgagaggtgattgaaatatgggggaggtctctcatgatataacatcattgcccttggtgctgccataatgattgagaattcttgtgagatctgattgtttaaccatgtgtagcacctcccccttgctctcttcttcctgcctccatcatgtgagatgccttgctccctctttgccttcctgcattgtaagttttctgaggcctcctcagaagcagagcaggtgccagaattatgcttcctatacagcctgccaaaccatgggtgaattcaacctcttttctttttcttttttctttctttttcttttttttttttttttttgacacggagtctcactctgtcacccaggctggagtgcagtggcatgacgtcagctcactgcaagctctgcctcgtgggttcactccattctcctgcctcagcctcccgagtagttgggactataggtgcccaccaccatgcccggctaattttttgtatttttagtagagacggggtttcaccgtgttagccaggatggtctcgatctcttgaccttgtgatccgcccgcctcagtctcccaaagtgctgggattacaggcgtgagccaccatgcctggcctcaacctcttttctttataaattacccagtctcacatatttcttggtagcaacatgggaacagactaatacacccttatattcagtagaacaaactagaaagtaagcagttctaactatgtacctgatgtgaagctcaggacaaaaaacagagctatgaagataatgcctggaatctctcccagcacggccaagaggcatagctgggacatggactggctttgctgtggttacatcacttgaactcagaatctaagagctcaaatctaaagacataagcctacagacaaattaaggaaatgtatatatgcagagcagctgtttgaagaccttaagacatctagtagacattataaacctgtctgccaacagacccaggcacaaatatctaaattaaattctgaagacatttctactttattttaccaataatttaaaaactatctttatttaaagattactaaaattgcatgaactgaaaagcatttgtgcttatttactttatttatgtgtactcatttatctttacattaaattgataccatgtgtaaactatatacaaacatatggatagacatatacatatatgtaatgtaacatattgcatatacatctacccataaagataaagggtgacaaaaagactgtagggttttaattttaggactttaatcatgggatgggtaaaactcactattttaaaaggacagttggattcaaattgtgcctttgtaaatgaaaaaggtaacatttatctgaagaagcccttactgagttttagaaaaaatgggtagcaaatttacctctcaaaacacagaaagggatagaatttaagcttttacaagaaggactttggatgtgttcaagaaaggttaaaaatagatgctaaggtaacacaaaaaagatagaaatttaccataagattttataaggaaactaattttattttaataggtagctttaatttggtctctgtttaccaactggaccactgagctcaggacagagcccattaaagaagagggatgacaaagtctttgcaatttttagatcctaataatttaaatatgtgaaaagaagacacaattggaagggagaggacctagacctttaaaaatcaaggatttcactgaatcccaggtccccaagaagagtaaaatgccatgggaaccataatgtgcaacacttccacagtttactttgctacaaaggcatttttttcattgtttgaactgtgtctttcttatctaaacatgcaaagatataagtagtcttctgaagtagtattcatttattataaccactgttagtcacctccaaaaccatagatttaccactgacccagcagccagcacacacacaagatgaagtatttgtacagtacaaagtaatcgctgatgaccctaaaagccagaggtcaggtaacacaacagaaaacagagcagggttttagaccagaaaggaatccattcactcgcaactcttggggttccatgtggaaaaacacagaatcttcccaaacagaaaagtctgtggcatctttcctgtttttcctaagtggtcccaggctgttcagaattctttaggtcccttcgtgtggcatcaatggtagcaagagggagataaagagaggaatgaataaaagaacaattgttaagaaaggaacagagagactaagcacatgatttaaaatgattccagtcacctgaaaaaaaaaattcaagaaacaaataagaaaagcagaaaagtgaagcagcatcattgtctggggtaaattcccaagatatattgtctcatggccacagaaaactaggtttagagtggaagtttaataggtgaaagaaagagaagaactctctgcagcagagagtggtcctggagaaatgggttgctgcttctgtggtgaaaagcagcaggttttatagatgagcttgaggaggtggtgtctgatttacgaagggcatgagatattagtcagaccaggtgttccatttgcataaggtgcaaaaagctggttagggctaggtgtgccatttgcatagggtgtgaaaatctggccgcccccaccctaatcttttattatgcagatgggttttctacctgactggcaccatgttgccagtttctttaccgtacatgtggtgaaaaaaggaaagatggaacctccatgtagaacatgtctgccccccacccaccggtagctcctttctattggcacagctgctggcattcacctgtgcaagattccagcttgcttatctatttctgcagttcgatttttcaggctgctctttgttagaaaagaaatgatttgggggctgcttttttattgaaagggaaatttcaccaaggactctgttgcttttactatctgcctaaatatcttctttctatctcctgtatcatatttccccccttaggagtagtaaccctaactgctgttaaggggtgttggacaatgactctttctggctatttcctgctgaaaaggggtgtagtgtgggaaacaacagttaagtctcctcctgaggtcaatctaagtgtcctcagaagagatgcacgtccatgtgtggttccattgtgtgccgcaccatttggagtttaatagcttctagatgagaagagataaatgttacaagatggtttagagtatagaatttgaatatgagtattaagattatcattattagttggggtactacaggccacaaccatgacagtagagtttgatacctgttagctgttccgatgggttgtaatactgatttcctccaccagatgtcactgcacctcaccagaagtgttaatatagaaacttttttttttggataagtggcattggattgggtgttgggagtaactttagtgttaactttggctaaatcttttctgtaatgattagtcctgctataaagatgataattaagcagaatattacagcaattagaattttccatccagagtttcacattgtgagtgccacagtgtatagtcatgctgcaaatagtagagtgagtataacaattcccacaagggtggtgtagtaaataattttcatgtaaaattttactccccaagatatagaatttccctttgggggtctatgaaattacaaatgtaatcccatggataatcaaaatctccctgcaagtatgtgtcaaaaagaagttctagtatgtggtggtgaatcttgagaggaaaggtagaaatgacaaagtatctggtgaggtaggggtgggactgaggaggatgagtagacctcactcatttacttatctcttatgatttttagcttaagttctcctctctcttcacattgatatctgggacattcctctaggctgtcaggagttgctccctcagctttccagactttggctcgagcgtcacgtatccaagagtcaataactgtaacttttaccactgagggtgttgaaagaacagtgtaaatttcttcccagcttgagcttagggaaggagagagagaaaggagagctttcctaataccaaatctcctgggttaaataaaggtggtcttattttctgtagttggacttctgctagttgtgttaatttctgtggaaagtgagccagagaagttacatgtttaaccaattcagaggtttaatagaaaattattggtaaggccgggcatggtgtctcatgcttgtaatcccagcattttgggaggccgagtcgggcggattgcctgaggtcaggagttcgagaccagcctggccaacatggtgaaaccccatctctactaaaaattaaaaaaaaattagccaggcatggtggcaggcacctgtaatcccagctacttgggaggctgaggcaggagaatggcttgaacctgggaggcagaggttgcagtgagtggagattgtgccactgcatgccagtctgggtgacaagagcaaaactccatctcaaaaaaaaaaaagaagaaaaaaaagaaaatcattggtaaggaaaggtcatccatacagcattttgaaagggcttaggcctaactttgaaaaggtatttcttacccacagtaaagccatgggaagaagagtgacccaaggaaagtgggtttcttggaacaattttctgaggtgtcttttgataatatcatttgtcttttctacctttcctgagaatgggggtctccaagcacaatggagatgacactgtatgcctaatgcctttgagaccccctgtgtgatggctgccttaaatgaggggccactgtcaattttgaggtacttaggtagaccaaagcagggagttattttattagctaacacttttattacctcagaggccttttctgtaaggcatagaaatgcttctacccagttagtgaaaatatctacctataccaggaggtattggatgcccttcgtctttggcatgtgggtgaagtctgtctgccagtactcccctggatagtttctcatcctttaagtttgaggaggaagaagccgcctgttggaattatttttaagacagacttcacaagcattaacaacatgctcaactgtttttaataagttatctcctgaaaacaatctctgggcacactgataagttttatcatttctcaagtgaaaatcttggtgaaggatattaagggtgttccactggctggaggctagcaagtggagtttgccatcctctgactattgccatcctgagggctgaaaagtgtacccttgagagatggctcaatctatctctgcaggggagtaatgaggcttaatttttcttatggagccttcccagattagatagccttttagtgtgttaagatcctgaggctttcttgccattgacttggctgcctgatcagctaacttgtttcctttggctaattcatctcttcccttctcatgtcccttacaatgcattactgctacctcttgtggaaggaaaactgaggataataacctgttaatttccggatggtattttataggagatccattagtggtaagactctttccttccaaattgcagcatgaacatgtatcaggggaacctgccctcaatatttcaatgtaggttctttctatttttcataagtttcagctggctgagaaataaagagtacaaagagaggaattttacagctgggcctctgggggtgatattacatatcggtaggaccgtgatgcccacctgagccacaaaaccagcaagtttttattaaggatttcaaaaggggagggagtgcaagaacagggagtaggtcacaagatcacatgcttcaaagggcaaaaaggagaacaaagatcacatgcttctgaggaaacaggacaaaaggcaaaacagaactaccgataagggtctatgttcagctgtgcacgtattgtcttgataaacatcttaaacaacagaaaacagggtttgagagcagagaactggtctgacctcaaatttaccagggcgggttttttttcccaccctaataagtctgagggtactgcaggagactagggcatatttcagtccttatctcaaccatgtaagacagacactcccagagcggccgtttatagacctccccccaggaatgcaattattttcccagagtattaatattaatattcctttctaggaaaagaatttagtgatatcttccctacttgcacgtccatttataggctctctgcaagaagaaaaatatggctctttttgcctgaccccgcaggcagtcagaccttatggttgtcttcccttgttccctaaaatcgctgttattctgttctttttcagggtgcactgatttcatattgttcaaacacacatgttttacaatcaatttatacagttagatacagttatcacagggtcctgaggtgaggtacatcctcagcttatgaagataacaggattaagagattaaagtaagacaggtgtaagaaattatgaaagtattatttgggaagtgataaatgtccatgaaatcttcacaatttattttcctctgccatggctccagctggtccctctgtttggggtccctgacttcctgcaacaagcatggagaactaagaaagcatacttggagtcagtgtaaatgttagctacctttcccttgcttaattcaagtgttcttgtaagagctatcagttagctagttgagcatttgtgcctggagagaggggcccactttcagtaacatcattcagagtgactatgacatatcctgccttatggactctgctttccaaagaaatttccatccatgaagaggctgcagtttggattttctagaggaggttccctgagatcctccctggctatgcaggtctttaccacatcttcttcatagtcatgttcaggttcctcagcgtggaaagtggttaggtttaggtgagaacaagttttcaattggattgtagacccttctaacagcagaacgtaatatttaaggagccagctgtctgttagctgaaggcttcccctagaagacagcaatcttgctacattatgtggggtataaagagttaggccatttcaaagggtcaatttggtgaccttcaataccagtagggccattgtggcaactgctcagaggcatgctggccatcctttagccatcaaatcaatcaagttctttgctccgctgtagtccgctggctgttgagttggtcctcgggcttgagttaaaactcccagggctgttccctgcatttctgatacataaagattggaggccctacctatgggaaagctgagagatggtgccttaagtaaggcttgttttagctggttgaaggcctttcgagcttcaggttcccaggttagaaaatgagttttagccacttgagtttcttttatgaggtgatataagggatgttctatctcactgtacccaggtatccatagtctgcaaaatcctgtgatgcccaaaaatctttagttgcttgagggttttagggagtgggaaaaaggaaatggacttaatcctttcttcttctaatgatctggtcccttcagacactattaagcttaggtacttcactgaggtttggcagagctgggccttggattctgaaacctctgtctgctaagaaattaagaagagttttcagtgccttcctgagaagcttcctcagttgcagcacagagcagcatgtcactcatatattgcaagagcctggcctgaggatgggaaaactcagagaggtcctttgacaacgcctgtcaaaagaagtgaggactgtctcaaaatccctgaggcagcaccatccatgttaactgggtggtctggccagagggatcttcaaaggcaaacaagtattgagagtgaggatgtaatggtatacagaaaaagccatcctttatatctaggattgtgaacaatttagttccctcaggtatttgagttagcaagatatagggattagggaccacaggatgaattgcgactgtggccttattaatgaggcagaggtcctgaactagcgtccatgccccactgagtttttgcactcctaatattggggtgttgcaggggctgttacagggtttgaggaggactcaacctattcttccttgaacggcccacgcttctggattaatattcgcttccactgggggagacaaagtgtttatcctggggctgtaaggatgttggcccccgtgtgattaaaaatatttctacctaataaaggagtgagactttcagacatacttaagaaggcatgtataaataataggtctcccactctacaactaaggggttgagaaaaatactgggttagaacctttcctgagatgtctatcacagtcatgctacaggaagaggggaggcctggattagagagaagagagaggctgcctccagtgctcagaaggaggtccacgcttcttttaatttccagtatcacctggggttcctgtgcagtaatggcagcttaagctgctggagccaggggtttgaatcctgggacccatccgtcccattggaccatctgtgaaacttattctgatctcagtgacctccatctccagggggagtctgatggaatgggcgctgtccaggttgctgccctctcctgaagcttgataatgaggaacactgatgtgtcactacagaggaggctgtgggaaaaagctgtttctcagggtggcctggatcacaagttggcggcacttttgacttggctggacctgtgaattacaggaattctgcttcatgtcagcaaccagctccttcaacttcgtgttcctctttgtagccgattctcttggcctgattcctgagcctgttctagagtcctcctcacaatacctgatggtcagggctgtgtgtggagacctaatgaagggtcttctgtgctcacacagagtgtccaggggacaggcttcatgacctcccctgcctcaaccccacaacaagatctggatagtgggccgggtcagataaagtcagaatccccagcatgggtgtgtgtcctggcagtgctgaggtctatgccccagatgaaccctcagtctctttgcaaatacatttatgttttgcatgtgttgttggctggtcagtctcatgtctctaaattcttgtatcaccctgtggataaggtaatagtctgcatataagtatataaaagctatctgatcagggtgggtgtgttttacatagtggagttatttttcaccaaagacgtttcaaaaagctgtagtagaatgtatgtatagacacacatgcatatttatatgtgttagatgttaatatatatttctataaatatatgtatatttatagaaatataaatatatattaaatttatatataatgtgccattttaaccactttaaaatgtgcaatcaaataaaattaaccacacacacagcgttacattaccatcaccactatttttcctagaaaatttttatcattttaagctaaagatctgtatcttttaaacaataactccctattttttccaccctagaccttgataatctctagtctactctctgtctttatgaatttgcctatttttgatgtttcatataaatggaatcatacatatatgtcattttgcttctcgcatttttcacttaccataatgttttcaaggtctatgaatgttccagtgtgtgtcagagttttgttcctctttatggcagattaacattctgttgtatgtgtcaccacatttgtttatccatgtgttgatgaacacttagattgttttcatattttatcttttgtgaataatgctacaatcaacattcccatgtgagtacctctttgagtccctggattcaattctttgggtatatacctaggaatggatgctgttttgtatgagaattctatgattagcttcttaagggacagcacaactgtttctcctagtggctgtacctttttataatctcaccagcaatgtatgaggattctaaattctacataaggctttcacttgttatttaacattttaaaagaatggtagccatatttgtaggtgtaatgtggtatctcattgtggctttgactttgtattttcctaatgactaatgatgttgagtttcttttcatgtccctcttgatgatatgcatatcttctttgaagaaatgtctatttgagtccttttcccatttatataaattgggtggtttgtatttttgttattgatttgtagcagttctttatatattctgggcatgaaaccattgtctatgtgatttgcaaatattatctcattctgtgtttggtctttttattttcttgataatatcctttgatgcacaaaaggcttgcatctttagcccaatttatctatttttcctttttgtttctcatgcttttgggtcatacctgagaatccattgcacatttgaggtcattaagttttacccctatgtctttttctaagatgtttttatggttatagatcttataattaactcactgatccatttttagataattgtttgatacggttggagtacagttctctaagtttattgttttgcatgtggttatctagttgtttctgcaccattacttgaaaggatgattgttcctccattaaattatcttgacacccttgtgcaaaagcaattgactttaagggtgagggtttatttctggactgtcaattctatccctttggtctctatttgtattcttatgccagcagcttctgtttttaatagttgtaatgttttgtgagatttcaaataagaaagttcaagttctgcaatttattttggcaaaattgttttggctatttcaagggtacttttttgaaaagcaaggaggccaatgttttgcaattgggaaagccttttctgtcttgttttggaggcaaattttgctgtctagggatcttttcaagaactttatcaaagtaggtgaattatcaccacttcctttgctgaggtactgtgttaaaatgtgtgttgcctcccgttgaagaattgagagaccctggaagcacttgcccatgtggtgaaggacagtgagctccataattaggggcacagaagacattgctttgggacacaatgttgtcagggtagctgtgtgcatctctacttgtttatttttttgtacaacttgcatctctgctggacatactagatattgaaatctttgttcattctcttggttctgggttggctgacctgtcagctggagctggaggacatgcctggcaggggagtgacccccatgggaaaaagcagggctcagcagagtgaaggcagctgggacccagagaagccagggaggtctgactcttagaagtcaaagaccagcaggtgggtgtcctcaggggcaaatggactgcactggtacccattgcagtggacttgaaaaaggtaagaggctttgggtatctcattttctctctcagctcttcagcaggagatttgggccctgggctggtactgtcctgcagcaggggcagggtagacaggaatggctgcatatcaggcctatgtccatgtcatcctctcaggcattgccactgaagatggagaattttgtacagaggcccagcctgggcacatgggaggagccaccttgttaaaattaatttaagaaaacagtatgcatgctttattcttctagaataattattaatgtcatgttttacaatgtatctcttaaaggaatggtgagaatcatctacataatgtatgttttaagtggtcttttctataattgcagctttcatatgttcttatagaaaccattttctttgggaacacacaggcagtatctctgtgttcatttctactgggaaatatttatgcagggtggagagagtcacatttcctaatgagagatggaaagcatctgactaccagaaagtgtccaaatgctgctgataatgatcatggggctgcaggtggaggtcaggctggaggtgggtgtcagggaaagtaattttgagagtcttttttttttttttttttacaaaatcatgggcagaagccaccacctggacccaacacatgttggaatggatgagggacagaaatagagctcagtaaattaagaatgaaatccaagagtgggcaagaggtttgagaggtcgacgggtgtgagaggtggatgggtgaatggtgagaatgttcaaaacatcttctttctccataataagggagcatttaggcccctgagtcagacagtgtccaggacagggggagcaggatgttgtcagctctcctggccaaaagtgagactccagcagtgtccagttacttggtccattttgggatttattaatattttaaagatgatccaacagtatacaattttgaaaatatacaaaaatccctatgctaccattcatagatagctaagatggccctaagatggtgagagaagcagaatggggtttgggtttacattgtatatttttttctcccaatatctacagaattccctacatcccactttgtaatgtaacccagtgggtgtcattcccattcgcagttacagacctttccggttcatggttacagacccttggaaaacccataccatttctgctgtgaggtacaggcagccatgtggcatcatctctaaacatgccttctgggacatcaaattgctgattaagtaaaagccatttcaatcgatattgaagacctcaattttaccactctcacacttgtaattcttctaccaagaggtgatggattttagtggtgatttgcttttatagattagtgtagattaatgcttctgccacgggcaattttttcattcggaaaagcatttggcaaagtctggagacactgctggttgtcagagctgggggagggagtcctgctggccttgagtgggtagagtccccagatagtgctgaacattctagagctcacagagccccaccagcatgaccactacaatgttcaatgctgaggaggagtggagagccctgatatgcctcccctagcttctctggagctttttaccttctccttccatcagtctctaccactttctcacctcagcttgctccttgaagcttaatgccttccacttgaacttgcccttagtttaagacctgctgtaatttctcaactcccctggcccctttctgatccttagcagggtgtcctctagagggcaccctcacctttcctgtagcttcccaggatccagatgcacctgccctgtgtgggcaccagggatacggccgtgtgcctgtgtccctaaaggtcctgtcactcacgaccttcgtgtgagagcaactgaggtgatattaccctcccctacttttcttggaacataaaaatttgtgcaaaccttgtagagtaaaatttcttaatgcatgtgaaaatttaaaatatatatatttttgcctcccaaactttactgggaaaaatttatcacggtcacagtcataaaaaatgacacctaatcagagttattcactgtattgtttaacagcaaaatattgggaacaacctagactttcaccagcacaatgctaattaaacaggttaccttatatctatacaacagaatatgatgcagctgcataaaaagtatggaatctttcagctatgcatatggaaacacctccatgttctgttttaattatagcatctaaacatcacagaataagatgaagtttttgtactagatctgaccttagaacattatttttactgtttttttgttttgttttttttaagagagagggtctcactctcataccgaggctgaagtgcagtggcaagatcataattgactgcagcctcaaccttgtgagctcaagtgatcctcctgcctcagcctcttgaatagctggaatcacaggcacttgccactatgcctagctaattttttgtgtttgtttctgtagagatggggtttcacccaggctggtgaaaacccaggctggtctcaaacttctgggctcaagtgatctgcccactttcactcccaaaatgctggaattacaagcaagtgtcatcacacctgattctgccttttttttttttaattggactgcagtctactcactcatcacttttcccatcaggtgatttctaattttcctctatttctctaccatatgtccatgccaaaatccagatgtatttgcttttgtctagaattaattttttttgttgttgttaaagagaagccttagaaatggtctcctagctgattttcaggattctaatcttcactgtctaagccataggtttccaactctggatactgattagagtcacttgcagggcatttaaagcctaccaatgcctgtaccatccctcaagtgtatctgatttcgctgatgtgtggtgtggcccagggattggttgtttaaaaatgctttcaaggaaaagggtcattttgcagtggaggaactttagcccagtgatcaaagttaacatccccagtaatcagagataacgacatcttagggcattctaaatatgatggatggagaaggtgcagcatcacccctgtggtattcttgtacaaagcatataacctgagtttaatcataagaaaatattagaaaagtccaaactgagggtcattctacaaaataagtcaccaacactcttaagaaatgtgaaggtcttaaaggtaaaagaaatcctgattaactttcccagattaaaggagactgagagaacagtacaatgaaatgcaatatgtgataccagattggatcctggcccagaaaaaggacattagttagaagatagaggggatttgaataaggtctgtacaggcattcattttacagtgttaataatcatttattgattttgatgattacgtgcatatctataatgttaatatttggggaagttgaatgaaaagcatatgaggactttgcctatttttggaacatttttgaaagtctgaaattatttcaaaattaaacataaaaagaaaagaaatatagatcttttagatatttctattaagttgccaaagttgaagaccatttcccagcttatcttgcctaatactgtcagagtaatcttcctggaaatgctgtttgtcatgtttgtgacctcaaagctttccagtgacttctcttatctgtaggatgaagttcccattatgtaggctgccattcagtgccctcatagcatagccctgatctcccttttttctgatctgtgttgaaagacctgaccaacattttactttcttatgtccaaaactgttcgaattttttcttgcttatgtaatgcccttccctgacttctcaactgtgggagttcagtcaaggtggtgggaaagattttagaagaaaaattataaagatagttataggaaatagtcacaaaccttcttggaaggccgggtggtttgcatagctttagtaaaaggtttggctgaaggcagctgaattatcttaaaagcttagggtgtagatacataggaatgtagaggagtttatctaaatagcttgtttactcaggcggacctaaaaccaacatttaatcctatgctcggggaactactcgggaggtcggcaatgtcaattaccttctagtggtgtttactcaagacctttgtcatttaatctgtactaaataaatgtgaacctcgctggctgatcagggctgcagctgctaactctttacccgaagggtctggccccttcttggtatcggtgagtagtgactcggccgcctagcctgctctttcgccagatatttgtgtctgagtgtatttgttcatccgttgctgggtcagggtctgctggttggacccagacagttagtgccctgtgtgaggacctggcatgttggtgcccaggtctgaggtatagctgcaaagaatcgggaaccctcgaaaacgaagaagactgtgcccttggtaagccagtaagtcagtaagtcagtaggtcattggtgcccgcttgggatctccaagttcgagggaattgttgcggctagggtttgatcatgggacaacagttatctgcacaacagaagcagtatataaaagtattcaaacagctgcttaaagccactggagcctcggttttgcaggctcaattaagggacctaatgcaaattgtatcacttaacccatggttcccagaagaaggtacactagacatagagctttgggaacaagtgggaagaaatttttttttttttttgagaccgagtctcccttcttcgcccaggctggagtgcagtggcgcgatctcggctcactgcaagctccgcctcctgggttcatgccattctcctgcctcagcctcctgagtagcagggactacaggcgccagccaccacgcctggctaatttttgtatttttagtagagacggggtttcactgtgttagccaggatggtcttgatctcctgaccttgtgatccgcccgcctcggcctcccagagtgctgggattacaggcgtgagccaccgcgcccggccgaattttttttttttttttggagacagagtctccctctgtcgcccaggctggagtgcagcagcgcgatctcggctcactgcaagctctgcctcctgggttcacgccattctcctgcctcagccccctgagtagctgggactacaggtgccggctaccacgcccgactaatttttttgtatttttagtagagacaggttttcaccgtgttagccaggatggtctcgatctcctgacctcgtgcgcaagagcaatgggtcccagtataatctttaacgctgtgggctttagtgagggcgactctggtcccattatacacagaagatcctaaaaaggggaaggagaaagaaccgtcacctattttaccacccctgagtccctcagccccactatcaccgggccaaaataacaaagaggaaacgaaggttttgcctgagacccctcctccaataaataagaaaaaagacaagggatacactacagctatgggaccctgtcttaagcaagcggcattagaaggggagcttttagcctgcccggtgatgcaaaatcactaaggtaatcaggtgtatgtttataaagagataaggaaaggcattaatggggtgcagcacaccaacatggcacatgtatatatatgtaacaaacctgtacgttgtgcacatgtaccctataacttaaagtataatgaaaaagggagaaaaggcattagaagccgaagctgcgcagccaagcgggcggagggcgaaaggaaagcctcagctgcaaaaaagctcgcagcgcccaagctgacagggttcggccaggccagcagcatccgcaccgcggtgggaggagggagcggtgcagacaaaaagccgcacagacaaaaagtggcgcctaaacaagcacagtgcggcggccgcccaggacccgcccggctgccctccggctccacatggggcccatggtaaaatcgcatgtgttctttgtatacaaggaacatcccaaattataattctctgttaaaatttaagttaaatttaaattataattatggccactgtttttcctctgctacccctgatatggctctctcaaaatcttaattgggtaagagtgacctctgaagggagaaaaattacaaagagcccataaattagttgaggaacgattaaaagccggccatatagaaccatctaacagcccttggaattcgcccatttcgtcattcccaaaagtctggcaaatggaaacttttgcatgacttacgtgttattaatgctaatctacagcctatgggaccccttcccccgcggcgattcctcaagattggtctataattgttattgacttaaaagactgtttttatactattcctctcgcagaacagagaaaaatttgcgtctacattaccagctattaaagtctgtcagattttacactgataatgctttttctttttatgtgcagaataaagacaagatgagaccaaatattcttccccctacttgtctcttcctacctgctttccctcctttaagaagatgtgtaagtgccaggcctcctgaaaaccacctcaaggacacaacaagccatagagggtttctacaacttgtgtttttccagggtatgccctcaagctctggtccaataaacctcaattgattcagacacaaacctcaactgattcagacacttgaatcaggcactcaatttggttaacattttgccaaccatgaagggggtcctcttaatggagtttagaacctttgacctgcagtgcttcttttgttcatgctcagtaccaactatagagctttagttgtgaccagtcatgtgactttctgagaattggatcctactttctcttgaggtccctgctctctccgatttttttgtttgagatctgagttttgtttcttcatggaactcctctcctcatggagctttgctcacttcctaaaaggaacatgagtttcctgctcctgtgacaatggagagccgactacagcttggtccctgctcaactaaggagctggtttggggtttttagaatttggtagctgcaggataaggcttattactacttcattctaacctctccttatgcttagagtgttcaacagtatgtaaatagtgcagtcgctatttgtgtttttggtttttatcattcttcctttggatttgaccaactcttcaccttgtctaatgtccagaacacctttcacttggtcaaatccaaatctaacaggagctctaaattatggtgaagcaggcctttaaactggctaaaattctgtaatggcagaacatccaactccacctctagaaacacctgtttgttgaagaaaataacaatattttaacccgcaatatatttctttgacaaattttgacatgtctgtcagagggccagcaaatagaagtggccctgcacagttgccttttgtggaaaaaatctacatcatagagaatcattattaatgcaggcatgtcttcccttatctggatctgggaaaaatggactgaatctgataccttaaagataaacaagtttagcattgatttttctctgagggctgctacctgcaaggttttactgacacaagaccagctttgctaactgaacttcctttctttctcccattacctgtattaccactaaaacctgatttacctccataacctcgttttggacatgcagaaatgcagaaaagtaatcagccagctaaagggtaaaaatgtattagtctcaagtttcctggcttccctctgtgcattctttccaattggatggtaaaaatcactgtttcctccaccaaattttgattaatgggagatttgtgttggactagtcttggtgtagtaattctggtgtactttttagtaatgttggggtatgagtattttgattgtttaatccatttcctcccagaagtagtcttttcctttatctctttcattctgtgttgctcataaagggaggtactggataaagttttctctcatcttgtgatatgtccttgagggcttgatttgtgaccaagtcagagcactcactcttggtctccaccatcagggggaggagtcatttttgagtcacattaggtgaccagctgtaacatggctgagaccctgaggttttttatttgttttgttttccaaatgtgttaagctcccaggagggcttgtcataagaagtcccatccaggctgggtgcggtggctcacacctgtaatcccagcactttgggaggccgaggtgggcggatcacgaggtcaggagattgagaccatcctggctaacacggtgaaaccccgtctctactaaaaatacaaaaaaattagccgggcatggtagagggtgcctgtagtcccagctactcgggaggctgaggcaggagaatggcgtggacctgagaggcggagcttacagtgagccgagattgcatcactgcactacagcctgggcgacagagtgagactccctctcaaaaaaaaaataaaataaaaaaaaaaaaaataaaaaagtcccatccatcagggacttttgtcattcccaagtcttgttgcttggatagggctgtggcaacaagagtcttttgctttcctaagcctattcctgagagtacatattttattttgtggtgggggaaaagatcattgggattggcttttcactgaagaggctgttggattgagtcacttagaatcaatacaccactggaaattctaattgtccatggccagaagatggattctttaaattgggacatctaagttaaaaaatattttagagatctcttattccaaacagttgatcagaggattgaatttcaaagaaagacacctgatagtgttatggctagccttaaaatttcttttgactaaattacagagcaaaaaatctcacctaaaacaaagttatttttttgtaagctcaaactgcttgacttagatcatctgagaaaataagaatagaagccactttaccttgtcattgaatagttaaaatcttatgcttttactgctgcagcctggatttaattttgggtcagggaaccagccttacttgttctgatatttgtgtgatttttgagtttttgaggtgctccttgacctctttggagatgcctcatacatccttggctaagccataatcttggttaaggcttattagtttcatttgggaggatacttttggttaaaaaaaaaaatcaaaagccagaaatatcagctgtttgtcctacctaaaatctgatatgaagaagtctgaggctgggcacggtggctcacacctgtaatcccagcactttaggaggctgagacaggcggatcaggaggttaggagatcgagaccatcctgtctaacacggtgaaatcccgtctctactaaaaatacaaaaaattagcctggcatggtggcgggcacctgtaatcccaacggctcaggaggctgaggcaggagaatggcataaacccaggaggcagaggttgcagtgagccgagatcgtgccactgcactccagcctgggtgacagagcgagactccatctcaaaaaaaaaaaaaaaaaaaaaaaagaaaatctgaaagtgtcacagtaggtagctggttagacatgagcagggcaggagagagctttccacccccacacactagaaatgtcaagtgatcatcaccaggtgatggtcaagtcaggtggttgttaactgtctctaaagtaataattggttgcaggtagtgccagggagatatagtctcacaatagatagaaaacacctgaaacaggtgatcagcagcttcccaataagttctcagaagttgagcaagtgggctcaaatatacacattaagaggcaacataatagagtttctggtatatgaccttctagggacttttttttttttttttttacattttagaagcatcattttttaggaactatgtttttaaattttttattattttattttatttttaaatctgtaaatcttttatttccataggtttttagggatttggtatttaattacataagttctctaggggtgatttgtgagattttggtgcacccatcacctgagcagtatacactgaattcaatttgtagtcttttatccctcacccccttcccaccattttccccaagtccatcgtatcattcttagatgatacagagcttagctcccacttacgagtgagaacatagtgtttggttttccattcctgagttacttagaataatagtctccagtttcttccaggttgctgcgaatgccattaattaattccttttatggctgagtagtattcaatcatatatatatactacaatttctttatccactcatttatagtttacattcgcaccagcagtgtagatgtgttcccttttcactgcttccacaccaacatctattatttttatttatttatttttgagatggatggagtcttgctctgtcgcccaggctggagtgcagtggcatgatcttggctcgctgtaacttctgcctcccaggttcaagccattcttctgcctcagcctctggagtagctgggattacaggcatgtgccacctcacccgggtaatttttttgtatttttagtagagacagggttttaccatgttgtacacactggtgtcaaacccctgaccttaggtgatccacccacctcggcctcccaaagtgttgggattacaggtgtgagctaccgcgcctggccaacaactattattttttcattttttgattatgaacattcttgcaggagtaaggtggtatcacattgtggttttgatttgcatttccctgatcattagtgatattgagcattttttcttatgtttgttagccatttctatgtcttcttttgagaattgtttattcacattcttagctcactttttgatgggattgtttgtttgtttgctaatctgagtttcttgtagattctggatattggttatctttcagatatatagattgcaaagattttctttcattctgtgggttatatgtttagtctgctgactgttgctttgctgtgcagaagctctttagtttaagtctcacctatttatttttgcttttgttgcatttgcttttgggttcttggtcatgaacttttcgcctaagccaatgtctagaagggtttttccaatgttatcttctagaatttttatagtttcaggtcttagatttaagtcctagattcattttgagttgatttttgtataaggtgagagatggggatccagttttattctcctacattcggcttgccaattatttcagcaccatttgttgaatagggtgtcccttacccattttatgtttttgtgtgctttgtcaaagataagttggctgtaagtatttaggtttatttctgggatctgtattctgttccgttggtctatgtgtctatttttataccagcaccatgctgttttggtgactatggacttagagtattgtttgaagtcaggtgatatgacaccaccgcatttgttctttttgcttagtcttgctttggctatgtgggctcttgtttggttccatatgaattttagaattgttttttctagttctgtgaagaatggtggtggcattttaataggacttgcattgaatttgtagattgcttttgtcagcatggtcattttcacaataatgattctattcatctatgagcatggggtgcattttcattttttgcgtcatctgtgatttctttcagcagtgttttgtagtttttcttgtagaggtctttcacctccttgtttagatacattcctagttattatttttttataactgctgtcataaaaggggttcagttcttgatttgattctctgcttggttgctgttggtgtgtagcagagctactgatttgtgcgcattaattttgtatacagaaactttgctgaattcatttgtcagttctaggagctttttggaggagtctttagggtattctaggtatacgattatatcgtcagcaaacagagacagttttacttcgtctttaccgatttggatgccctttatttatttcccttgtttgattgatttggctagggctttcagtactctgttgaataaaagtggtgagagcaggcatccttttcttgttcccctgctcagagtgaatgctttcaactttttctcattcagtatcgtgttggctgtgggtttgtgtgccaattttgctgagagttttaatcataaaatgatgctggatgttgtcaagtgcgttttcagtgtctattgagaggatcatgtgatttttaaattatgtttatgtggtgtaccacattattgacttgtgtatgtggaaccattcctgcatccctagtatgaaacctacttgatcatggtggattatgtttttgatgtactattggattcagttagctagtattttgttaagaatttctgcatctgtgtgcaccagggatattggtctgaagttttctttgttatgtcctttcctggttttggtattagggtgatactggattcatagtatgatttagagagaattctctctctttctagcttgtggaatagtgtcaattaaattggtaccacctcttctttgaatgtctggtagaattcagctgtgaatctgtctggtcctggaatttgttttgttgttaattttttaattatcttttcaatcttgctgctttttgttggtctgctcagggtttctaattctttctgatttaatctaggagagttttacatttccaggaacttattcatcccctctaggttttctagtttatgcacataaacgtgttcatagtacctttgaatgatcttttgtatttctgtggcattcgttgtaatagctcccatttcatttctgattgagcttatttggctcttctctcttcttttcttggttaatcttgccaatggtctatcaattttatttatttttccaagaaaccagctttacattttatttatattttgtattattttgtttcagtttcatttagttctgctctgatcttggttattttctttcttctactgggtttgggtttggtgtgttcttgtttcttgagtttctagaaatgtaaccttagattgtctatttgtgctctttcagtctttttgatgtaggcattaaaggctatgaacttttagcatggtctttgctgtattctagatgttttgataggatgcatcactattgttcagttcaaagaatttttaaattttcattttgatttcatatttgacccaatgatcattcaggagcaagttatttaatttccatgtggttggttttgaaggttccttttggagttgatttccagttttattctactgttgtctgagagagtacttcatataatttcaattttcttaaatttattgagacttgttttgtggcctatagtatggcctatcttaaagaaagttccatgtgctgatgaatagaatgtatattctgtggttgttgggtagaatattctgtaaatatctcttaagtctatttgctcgagggcatagtttaaatctattgtttctttcttgactttctgtcttgatgacctgtctagtgctgtcagtggactaatgaagtccctcactattattgtgttactgtctatctcatttcttaggtctagtagtaatagctatataaatttgggagctctggtgttaggtgtatatatgtttaggattgtgatattttcctgttggacaagtcctgttattattgtataatgtccctctttgtcttttttaactgctgttgctttaaagttagtttttttgatataggaatggttactcctgctcactttgtggccatttgcatggggtgtctttttctacccttttaccttaagtttacatgacactttgtggttaggggagtctcttgagggctgcagatacttgcttggtgaattattatcaattctgcaattctgtatcttttaagtgaagcatttagaccacttacattcaatgttagtattgagacatgaagtactgttccattcatcctgctatttgttgcctgaataccttggttttatatatttatttattgtatttttgttttataggtcctgtgagattcatgcttaaagaggttctgttctgatgtgtttccaggatttgtttcaagatttggagctccttttagcagttattgtagtgcaggcttggtagtggcaaattctctgagcatttgtttgtctgaaaaagactgttatctttcctttatttatgaactttagttttgctggatacaaaattcttggctgataattttttttaaggaggctgcagataggtatgcatgctcatttgaggtgttcttcccttattaaagattgctaaaatcacatgtgttgaaaagcatttgggattatttacttaattgatgagtactcatttatttttgcattaatttgataccatgtataaacaatatataaacataggtatggacatatacatatatgtgatacaacatagaacatatacatgtgcacataaagatagaaggagacagaaatactttagatttttgattttaaaactatgcatagaacccataaaactcactattaaaaaaaagttggatttaaattgtgcttttgtaaatagaaaaagttaacatttatctgaggaagcccttgctgagttttagagaaagtaggtagtaaatttacatctcaaagcacagagagagagagagagagaaggaatttgggtgtgttcaaggaagattaaaaatagatggcaaggtaacacaaaaatgatagaaatttataacaggattttataaggagaccaattttatttccatacatagcttttattttggtctctattttccaactgtactccagggaacacactacacaggctcccttaagtgctggtgggccactgcacatgcagacagcccactttaagggaagaatcgggggagaagagatgcagaccccagaattatgccaacatacgaaagcctaagtcaaaggtcaaaccacacacttgaaatctcatcgcctgtttggccctgttttaagtgtactttactttctttaatttctgctctaaagcttttaaataaactttcactcttgctctaaaacttgtctcagtcttttcttctgctttatgactcttggttgaattctttcttctgaagaagcaagaattgaggctgctgcagacttctacagatttgctgccactaatatactttagtgccattctacatgatagaatatatatatattcttatatttatacatagatatataatatatgtattcatagaggccttgaatctacattcttgctccactttatgtaaacaatccaggtataagactaaaacttattttggaaatacattggtcccatatgatttctatttcataaaaatgggagacaggagggggaaaattatttttcagaagaaaacaacagaacaatggttattgaattttagatctgttctttttttcttgaactttgttatttacctacaatttggactgaatcctaaattttttcctggctacaaatttcaaaactaatggtttcagaattttcttccatttttcttccattttggtatattgtaaattaaaactgtgatttttaaatttttatctttttttattacacttttaagttctgggatacatgtgcagaacctgcaggtctgttacataggtatacacgtgccatggtgttttgctgcacccattaacccatcatctaccttaggtatttctcctactgctatccctcccctagtcccccacccctcaacaggccccagtgtgtgatgttcccctccctgtgtccatgtgttctcattgttcaactcccacttatgagtgagaacatgtggtgtttggttttccgttcctgtgttagattgctgagaatggtggtttccagcttcatccatgtccctgcaaaggatatgaactcatcgttttttatggctgcatcgaattctgtggtgtacatgtaccacattatctttatccagtctatcattgataggcatttgagttgattccaagtctttgctattgtgaatagtgctgcaataaacatatgtgtgcatgtgtctttatagtagaatgatctataatcctttgggtatatacccagtaatgggattactgggtcaaatgatatttcttgttctagatccttgaggaatcgccacactgtcttccacaatggttgaactaatttacactcccaccaacagtgtaaaagcattcctatttctccacatcctctccagcatctgttgtttcctgaccttttaatgatcaccattctaactggcatgagatgatatctcattgtggttttgatttgcatttctctaatgaccagtgatgatgggctttttttcatatgtttgttggtcacataaatgtcttattttgagaagtgtctgttcctgtgctttgcacactttttgatggagttgtttgtttttttcttgtaaatttgtttaagtttcttgtagattctggatattagtcttttgtaagatggatagattaaaccttgcaagctgaaactagacgacttatgtaaacttctggagaaatcatagcaacttatatataaacaacttttgtgcctgctgatgtggactacacaaaaggttcacatgaacactggattcagactgcaattcagaaatgtgtcagattgccgttgtaattggaagatgcttcagaaactctagaaaacctagtctatagactgctccagacattacaggtgagccaacatacaactgaaagggttcaagcggtgtttgccaaacgaattgctctaattgaagcagcagttgtgtgactttaataaggttccaggattatactgtcccttttttgctgtgacttccctttgcccttttctgatttgtcttcatccccttttccatggggcatgacttcttaagaatgagccttcctagtgatgtaggatgagatgaaacatacagtcacaaagtcatgtcttctacaatgctttctctgaaagcttttgaagaatcggggggccaggtgtgctggcacaggcctgtaatcccagcactttgagggtctaaggcaggaggatcacttgaaaccaggagtttaagaccagcctgagcaacaaagggagaccacgtctctacaaaacataaaataaatcaaattagccaggtgcagtggtgcatgcctatagtctcagatacttgggaggctaaggtgggaggaccgcttcagcccaggagttcaaggctgtagtgagtgcactccagtctgggtgacagagcaaggttgtgtctctaaaagaaaaaaaaaaaaaaaaaaaaaaaaaaagaaaagaaaaagaaaggggtaaacaggaaagccaaagatctcgagcatctccagatgattgcctgaacaaattgttttttcttggcttccaaacctttcaagatgtatattactttgtaaaagaaagacatgccaattgtaactttaagtgagcaatcaaaatctagctcctaaaactgaagtattttaactctcattctgataatttattttctgaggcacagaagaaagacaagattaggtcaattgtttttatgcccactccatctcttccaacctgccttctcccctttaatcaaatgtataaacactaagcctcctgaaacctcttcagagaaaacacaagccacagaggttttttgcaactcatgttttcccagggtgcaccatcaagctctggctcgataaaactcaattggtcaagacccttgcctcagtcagtcattctggataaccaccatgagtcctgcaaagcccttcagtaatctattgcctgcctaggtgatgtgtacccaggtgagtcaggtcttcatgagtcaaacactcgtcttccttttctgtctttcccaaccctaccactcagtgctgtgtgctctgatctgaccccagctcccaggttgtttgtattggtctaagaaagcaagaccaggaggggcaggttgagaaggaagtaagaggccaacagccatggaaagtggcaggtggggctgtcattgctcaaagccacacaccctgggtgcattttgtgaatttttctggattcggaatctttttcctgtgtgtctgtctagaaactcaccttcttcctactttcttctcagtacactttctgtttctagtgcactcatttatgtccagagaatggccatgcaaatagttgacaatagaataaaaaatgactttttatgagacttggaagctggcctttcttttttccaaaagagattgaggtttccataaaaactagcttttatgcagggctgtgtagttgtgagtgtagttttagggaacaggtgcataagtgaagggtgagacagaaaacaaaatgctggctgtttgtcaaatcctgaaagtaggggggctgaaatcatttttgaaggaggatgtcattcaggagaccttgtacatcttagagtgtcctcttaccagatgaagtggaggatgaggttgaattagggagttaggtgacagtgggcacatacttctctgcctcagttttttttttaaatctgtaaaaatggggatgataacactcaggattttttggtgaggactgtagttacctggaaagcccttaggatagtgcccggtgcatagtgagtgctgcatcagtgtgagctattataattatgggaataggcaaaggtgccaccctggccatccagagtggagaggtattttctggtcagggtccaggcaggccagctggagatgaagctgattagtggggaagcttaacttccaggagcggaagaatttaggaggagtaaacagaatgcacaacattctgtaaacatgcctttacccaacagtaggaatactcagagtgggtgtggcttccatggcaatcattatctcctgggaatctaagaatgtgtcctagagtcaagtggctttgatgtaagccaaacctggaaatgggcttcagggctgccttgcacatagcattcattcatcttgaaaaaggaaagcattcatcttgctaaaggaatcccctcttctggtccaggccattatttttgcttttgtactatcctaatttttaaggtgtaaggagaaagaccaaagaataaaataatgaagtacctgtatgaaataacagggtagaattgagactggtacgtgtaagttaagagaaattgtgtataaatttttgtgaacagaaaaaggatttcttgttgcaaactgacctctctatataaataatacccattgccttgaatggatggcagaccgcatcacaagaacattccagcagagtcatgagagaatgggtagtgtggcttctttaattggcaggttagactgagtaagttactgaagagaaaggagttgaaggagaagatgggtgagggcaagaaaaatgggaaggtgaaaggaaaggactgaaaggaatgtttaccaagggctcatcaggtaccaggctctgtgactaatgtcttacacatgttaatttactcttccactgtcattttctgatgcagtaagagtcagtcttacactacaggtgaggaaagaggctgagggaggtcaaatgagtggcccagggtcatccagccacttcatagcagagctagtgtgtttcactgtggtttgtgcagacagaaaagtgagacatagaaggaaggcaaaacatttttgttgtgggtgatgtttatgaaagtgacccgtatgaggcagaataatggcctcttaaaaatgtccacatccgggccgggcgcaggggctcacacctgtaatcccagcactttgggaggctgagacggtggatcacgaggtcaggagttcgagaccagcttggccaacatggtgaaaccccgtttctactaaaaatgcaaaaattagctgggcgtggtggcgggcgcctgtaatgccagctacttgggaggccgaggcaggagaatcatttgaacctgggaggcggagattgcagtgagctgagattgtgccactgcactccagccagggcaacatgagtgaaactctgtctcaaaaaaaaaaaaaaaaaatccacatcctaactcttggaacacatgcatttacttttcttggcaaaaacactgttcaaagttaatgaagttgagtatcttgagatggaaagcttattctggcttatctgggtggctcccagtttcatcataagtgtccttgtaagtgaaagagaaaggcaggagggtcagggtgagaaagatgcagcctgagagactccactggccattgcttcctgtgaacatgtgtgataagacaaaattacaactaatttagttacagatgtaattggcttttatttgtgatttatgatttggggcagctctccctctacagatgcctcagcatcccaagtagctgggactatattgcgggatctggccagcagcctgcaatgcaacggggctctttctttgttcccaggcagatcagcaggttgagaaataaaagacacacacaagatagtgaaagctgggtccagaggggtcaccgccttcttgtcctgcaatgctgccaatgcactggatataccagcatttattattaagtttagtgagagcggggttaggttagtgagggatttagggtcatttataggctctccacaagcgttgcattccattcccagagctatggacatctgcttttctgggataggaatcttggtaatgtgaaacctccctgactgcacgtctgttcataggctctctgccgggggaagcacatcacgtgctgttggctcattctggcagtccaacctggcatttgtctttacacaatcctgcatgcaattttgtatttacaataatcaggagcatttcatcttttattccatagcaatagtttcagggggtctccctacatctcccccttttctctgatttaaatgaaccatagcaatcatagcttggcactgatcacgattggattgaagaatatttttttccaattttacatatgaacaataaaccaatagcacaaattatacacagaacaaaattaacgatagtggatcctcccaaagatattacctattgaatggggttgagattagataacccctcagagatactgtctaaaacttcagcactgggtaaagcagttaagtgtgcttgagaggcttcaaaaatctgttcttttagcttgcttatgtctaaacttaaattatcttcacttccttgtaaatgggattttactgattcccaattatgaacagactcattatattggaactgagttatacaaaaatcagaagtattcctatcacactaaatttgtaatctatgttctaaactcataattctatctcccatccatataacagaagcacatcaagcgctgtaggctcattctggcagccaatctggcattgtctttacacaatcctgcattcaactttgtattgacaataatcaggagcatttcatcttttattctgtaacaatagtttcaggggttctccctacaggactacaggtgtgcaccaccatgcctggctaatttttgtatttttagtagagacagggtttcaccatattgaacgggctgatctcgaactcctgacctggtgatctgcctgccttggcctcccaaagtgctgggattacagatgtgagccactgcgcccagcccataaatcacacatttctttgagtttttgtaattccagcccaagagaaaccatttgatatttcaagaatggctgcacacaaatattttcacacaaataaaaacatctgtagattgcaccacacgagggagactaccagtatgactatcaggaggaaaatatcaagagtttggaatatgcaccttaggaaagatgcaaaccaactacaataggatagatcaaagaagaagccagaagagtctagtcattttaaccagtcagcaaatttattgatttttacaaccaagtctttataatacccaatgtatttatccatgtgcaacaagaagtgtcagaaactgcacaggctccccactgttcagctggtagagagcaattctattatctattattgcatgtctatgttaaattaaaaaaggggaggtgccaagatggccaaataggaacagctccggtctacagctcccagcgtgagtgacgcagaagacgggtgatttctgcatttccatctgaggtaccgggttcatcttgctagggagtgccagacagtgggcgcaggtcagtgggtgcgcacaccttgcacgagccgaagcagggcgaggcattgcctcactcgggaagcccaaggggtcaaggagttccctttcctagtcaaagaaaggggtgacagatgacacctggaaaatcgggtcactcccacccgaatactgcccttttccgacgggcttaaaaaacggtgcaccaggagattatatccgtcaccaggcttggagggtcctatgcccacggagtcttgcagattgctagcacagcagtctgagatcaaactgcaaggcggcaggaacccaccacagctcaaggaggcctgcctgcctctgtaggctccacgtctgggggcagggcacagacaaacaaaaagacagcagtaacctctgcagacttaaatgtccctgtctgacagcattgaagagagcagtggttctcccagcacgcagctggagatctgagaacaggcagactgcctcctcaagtgggtccctgacccctgatccccgagcagcctaactgggaggcacaccccagcaggggcagactgacacctcacacggcagggtactccaacagacctgcagctgagggtcctgtctgttagaaggaaaactaacaaacagaaaggacatccacaccaaaaacccatctgtacatcaccatcatcaaagaccaaaagtagataaaaccacaaagatggggaaaaaacagagcagaaaaactggaaactctaaaaagcagagcgcctctcctcctccaaaggaacgcagttcctcaccagcaacagaacaaaactggatggagagtgactttgacgagctgagagaagaaggcttcagacaatcaaataactccgagctacaggaggaaattcaaaccaaaggcaaagaagttgaaaactttgaaaaaagtttagaagaatgtataactagaataaccaatacagagaagtgcttaaaggagatgatggagctgaaaaccaaggctcgtgaactatgtgaagaatgcagaagcctcaggagccgatgtgatcaactggaagaaagagtatcagcgatggaagatgaaatgaatgaaatgaaacaagaagggaagtttagagaaaaaagaataaaaagaaatgagcaaagcctccaagaaatatgggactatgtgaaaagaccaaatctacgtctgattggtgtacctgaaagtgacgaggagaatggaaccaagttggaaaacactctgcaggatattatccaggagaacttccccaatctaacaaggcaggccaacattcagattcaggaaatacagagaacgccacaaagatactcctcgagaagagcaactccaagacacataattgtcagattcaccaaagttgaaatgaaggaaaaaatgttaagggcagccagagagaaagtttgggctacccacaaagggaagcccatcagactaacagcggatctctcggcagaaactgtacaagccagaagagagtgggggccaatattcaacattcttaaagaaaagaattttcaacccagaatttcatatccagccaaactaagcttcataagtgaaggagaaataaaatacttcacagacaagcaaatgctgagagattttgtcaccaccagacctgccctaaaagacctcctgaaggaagcactaaacatggaaaggaacaactggtaccagccactgcaaaatcatgccaaaatgtaaagaccatcgagactaggaagcaactgcatgaactaaggagcaaaataaccagctaacatcataatgacaggatcaaattcacacataacaatattaactttaaatgtaaatggactaaatactccaattaaaagacacagactggcaaattggataaagagtcaagacccatcagtgtgctgtattcaagaaacgcatctcacgtgcagagacacacataggctcaaaataaaaggatggaggaagatctaccaagcaaatggaaaacaaaaaaaggcaggggttgcaatcctagtctccgaggaaacagactttaaaccaacaaagatcaaaagagacaaagaaggccattacataatggtaaagggatcaattcacaagaagagctaactatcctaaatatatatgcaccgaatacaggagcacccagattcataaagcaagccctgtgtgacctacaaagagacttagactcccacacattaataatgggagactttaacaccccactgtcaacattagacagatcaacaagacagaaagtcaacaaggatacctaggaattgaactcagctctgcaccaagcagacctaatagacatctacagaactctccaaccaaaatcaacagaatatacatttttttcagcaccacaccacacctattccaaaattgaccacatacttggaagtaaagcactcctcagcaaatgtaaaagaaaagaaattataacaaactatctctcagaccacagtgcaatcaaactagaactcaggattaagaatctcacttaaaacaggtcaactacatggaaactgaacaacctgctcctgaatgactactgggtacacaacaaatgaaggcagaaataaatatgttctttgaaaccaacgagaacaaagatacaacatactagaatctctgggatgcattcaaagcagtgtgtagagggaaatttatagcactaaatgcccacaagagaaagcaggaaagatccaaaattgacaccctaaaaacacaattaaaagaactagaaaagcaagagcaaacacattcaaaagctagcagaaggcaagaaataactaaaatcagagcagaactgaaggaaatacagacacaaaaaacccttcaaaaaattaatgaatccaggagctggttttttgaaaggatcaacaaaattgatagaccgctagcaagactaataaagaagaaaagagagaagaatcaaatagacgcaataaaaaatggcaaagaggatatcaccaccgatcccacagaaatacaaactaccatcagagaatactacaaacacctctacacaaataagctagaaaatctagaagaaatggataaattcctcgacacacacactctcccaagactaaaccaggaacaagttgaatctgtgaatagaccaataacaggatctgaaattgtggcaataatcaatagcttaccaaccaaaaagagtccaggaccagatggattcacagccgaattctaccagaggtacaaggaggagctggtaccattccttctgaaactattccaatcaatagaaaaagagggaatcctccctaactcattttatgaggccagcatcatcctgataccaaagccgggcagaaacacaaccaaaaaagagaattttagaccaatatccttgatcaacattgatgcaaaaatcctcaataaaatactggcaaaccaaatccagcagcacatcaaaaagcttatccaccatgatcaagtgtgcttcatcgctgggatgaatggctggttcaatatacacaaatcaataaatgtaatccagcatataaagagaaccaaagacaaaaaccacatgattatctcaatagatgcagaaaaggcctttgacagaattcatcaacgcttcatgctaaaaactcaataaattaggtattgatgggacatatctcaaaataataagagctatctatgacaaacccacagccaatatcatactgaatgggcaaaaactggaagcattccctttgaaaactggcacaagacagggttgccctctctcaccactcctattcaacatagtgttggaagttctggccatggcaattaggccggagaagaaaataaagggtattcaattaggaaaagaggaagtcaaattgcccctgtttgcagacgacacgattgtatatctagaaaaccgcattgtctcagcccaaaatctccttaagctgataagcaacttcagcaaagtctcaggattcaaagtcaatgtacaaaaaatgacaatcattcttatacagcaacaacagacaaacagagccaaatcatgagtgaattcccattcacaattgcttcaaagagaataaaatacctaggaatccatcttacaagggatgtgaaggacctcttcaaggagaactacaaaccactgctcgatgaaataaaagaggatacaatcaaatggaagaacattccatgctcacgggtaggaagaatcaatatcgtgaaaatggccatactgcccaaggtaatttacagattcaatgccatccccatcaagctaccaatgactttcttcacagaattggaaaaaactactttaaagttcatatggaaccaaaaaacagcctgcatcaccaagtcaatcctcagccaaaagaacaaagctggaggcatcacactacctgacttcaaactatactacaaggctacagtaaccaaaacagcatggtacaggtaccaaaacggagatatagatcaatggaacagaccagagccctcagaaataacgctgcgtatctacaactatctgatctttgacaaacttgagaaaaacaagcaatggggaaaggattccctatttaataaatggtgcttggaaaactggctagccatatgtagaaagctgaaactggatcccttccttacaccttatacaaaaatcaattcaagatagattagagacttaaatgttagacctaaaaccacaaaaaccctaggagaaaacctaggcattaccattcaggacataggcatgggcaaggacttcatgtctaaaacaccaaaagcaatggcaaccaaagccaaaattgacaaatgggatctaattaaactaaagagcttctgcacagcaaaagaaactaccatcagagtgaacaggcaacctacaaaatgggagaaaattttcacaacctacttatctgacaaagggctgatatccagaatctacaatgaactcaaacaaatttacaaggaaaaaacaactgcatcaaaaagtgggcgaaggacatgaacagacacttctcaaaagaagacatttatgcagccaaaaaacacatgaaaaaatgctcaccatcactggccatcagagaaatgcaaatcaaaaccacaatgagataccatctcacaccacttagaatggcaatcattaaaaaggcaggaaacaacaggtgctggagaggatgtggagaaataggaagacttttacacttggtgggactgtaaactggttcaaccattgtggaagtcagtgtggtgatgcctcagggatctagaactggaaataccatttgacccagccatcccattactgggtatataccaaaaggactataaatcatgctgctattaagacacatgcacatgtatgtttattgcggcattattcacaatagcaaagacttggaaccaacccaaatgtccaacaatgatagaatggattaagaaaatgtggtacatatacaccacggaatactatgcagccataaaaaatgatgagttcatgtcctttgtagggacatggatgaaattggaaatcatcattctgagtaaactatcacaagaacaaaaaatcaaacaccgcatattctcactcataggtgggaattgaacaatgggaacacatggacacaggaaagggaacatcacactttggggtctgttgtggggtggggggaggtgggagggatagcattgggagatatacctaatgctagatgatgagttggtgggtgcagcgcaccagcatggcacatgtatacatatgtaactaacctgcacactgtgcgcatgtaccctaaaacttaaagtataataataataattaaattaaaaaataaattaaaacagggagtgagaataggtaagtatagaagtggaagcctaaaaaaaactccatacatttgaggaaaaagttgtgttacagaggcagctaacatcagcctttgggtggactaaaggatctctttttatgtaaaaatgcgtgggctgggtgcggtggctcacgcctgtaatcccagcactttgggaggctgaggcgtgcagatcacctgaggtcgggagttcgagaccagcctgaccaacatggagaaaccctgtctctactgaaaatacaaaattaggtgggcgtggtggcgcatgcctgtaatcccagctactccggaggctgaagcaggagaatcaattgaacccaggacgcggaggttgcagtgagccaagattgtgccattgcagtctggcacgggcaacaagagcgaaactccatcttataaaaaaaaaaagtgtggttgacatgatatatcggacactgttaacttactctcagaagctacttcttgtgaaatcctaagtacagcattattctgggaagcaaaggagacaggcagaagcaaggacaaattaagagaggtaacagtctcatcatgactgatagtcttgttctaacatcttgagaaaagctgtccacagtgtaaagtcatcaacttgtcgtggtttgcagtttgagtgtctctaagttatggtgttgaacatttggtgagctcttagtggcccacacttcagacacgagggtttctccatgaaatttacattgagttgtccatctccatcttatatggcttcaggaacagagctgctcttgttcttaatgatttcactggagaaaattaaattggaagaactaaaagaattcagggtccagtccagtctaccagtggattataagtactcaaagataatgaacagtggttcaatctggtaacaggtgtactacagtttttcttttcaacatagtttttctctttataggagtctctatttttaccaaagataattccagtaggatgaactcttttgcaaaataggttgagtctcaccgaacttgcccagattttttacctaagtgcggcaagagtagcgatggaccatagaggctctttttaaactcccctttgctggaagtttttagtaagaatctcagattaaacttccaaaaacctcttgagactaagaagccaaaccaaggccaacttcagactttgcctgcattccctatgggtttattctatgtatattctcaaatataacatcccagtcaaagccttggtaatataaccaatgttttcaaatgtgtcctgttataaagagagcagatccttactgaacttgtgcagataactttattaccataaacatatgaatactcctgaatagtttcccaattctggggcacttagggagcaaaagcaaatgtttcaatttttgtttacaaaagtatactttaccaattgctgaagaaaaaaagtgcataaatctggagaataaaacattcaaagaatcagcacattttcaaatagaaaattatgaaaacattgttttgactatttagtccaataaaattgggtttttttctttgtcttgaatttcatgaagtatcagcctgttcattaaaattttgaaagttcttagtccagtggtatgatcttgaagttatcaggaacttgtattcaagagtccttgtcagagtcttttcataaatctccttgaacaaaaagcaattttggactgtagctgatggtaaatactttgaggaagaatgaaagcaactgtctgggaatgacaaagatttaaaatgactatggttaaaaatctaatgagaatttattatggtaaagacacagctcacaaaatctagttacttctgtggcatatgacactatgataacatatttgatttccagaaatttcatataatttttagaatactcattaaaaaaattttttttttgagacggagtctcactctgtcacccaggctggagtgcagtggtgcgatcccagttcactgcaagctccgcctcccgggttcctgccattctcctgcctcagcctcctgagtagctgggactacaggtgcctgccaccaagcccggctaattttgtttttgcatttttagtagagatggggtttcaccgtgttagccaggatggtctcgatctcctgaccttgtgatccgcccacctcggcctcccaaagtgctgggatgacaggcgtgagccatcgcacccagcctagaatactcatattattaacattcccataaatattatttagaggaggtttagcatcacttatcacttatttgaaaatgctttctatataatttaacttatcaaataaagtggcttttccattcagcttctgtttgttaactggattactgagttcttggtgtagcccattcataaatagggccaaaaaagtatagtcttatgtatgttgaaaaaggtccttaggtaattccagtacttccagctgaacatcattgatttagttttaagttctacctattacaacaagagttctccatccttgttacatgttagtagtgtcagggaagacttaaaaattaccaatgcctgggtccctctccagacctttaaactggaactaatgggtggggcttgagcatccacttttaaaaatgttttccagtgattccaatgtgtagctctatttcccatcagatttctctgatttcttgtggcattcaattttttctattttggtatcatgattattttcaggtctcatttcctgtcttaggctttatgtctcctggcgtagggaccttgccttcatcatttctgtatcttttttaaacacatgaactggtcatcaggaaaagatctcaaccacacataggttgtgttctgagtctcaggttcacatgttaatcctaaagtcttagttctccacgaggtcagatgttgcttgtgatgaagggtgtggttaagtctgcagtgcagatggtagaggggatttcactctgttttcagacatagcattggaactaagaattttatatctatatgggtgaagggacaggggtgtgtaggaagacagttctaattaggatggaggaattatactaggaagtagcggtaaaggaagtgagaaggcttagtaaatagaagaaatgtgaacttatcaaagtggctagagtagacccctggagattcttgattaagtgaattaactagattttagaaaggtaatgaggcagtcatatgcaaggaagatttcaaagtctggagacaagaagtcaagcaatactttgagaagtggttgagctttatgggaatggagagaattacactattgagagatgttaaaaataatgaagagggtttcaccatgtgaaattgtgtttttcatttgaatctgagaaacaaatgagcagagagagaggctggagataattatgtctaaaagacagtggggtacagggagcataaaggccagggagaaagggaactgcaggaattagtgctgagaagcaggagttagtggaggaaggaggagatccagtcccagatacaggcaaataagtcttttccctctcccaagcatggcagttagccctgcaggaaccaggataagaggaaaggtcatcatacctgccagtcttcctgaaatacagaaatgacatcacggctgctataatggattaaggccaggaagatgtcctgttcctgaaggagctgtcatggaaaaaaaagaaaagaaggaatgaagatgatgttattttacatgggggagcctcaggaacaagcatgtaacatgaggtactctataattgtttcttcaaggactacgttatttctgttggaaaattgataggagatgattatattcttgcagtttttttttccctctcaccctgtttctcagttggtgatcagtcctctgtcaattctctactgtgctcagatatttggaaggctttcagatgtgagaaaggctgattgctattttctatgtcattagaacttgccacctttgcaccttttcatggttgcatctttttctcagtgtctctgttgtggcagtcatgaatgagaccctgccaggtctccatggcagagacttgattgacagaaggcccaggtcagtgcatttcaaattcaccacctcctttgcacagaaagcttctttcctacaggctcccagcaagggcgtgaaagcaagtctagttctctgaggctctctttaactctaatgggtgactggttggaggattccccatcagccttgcaaaaactcttataattgaattggtacctaaaacttctttctctttctttttcacaggaatcagctctgcatagtggtctgtgggttctcccgtactaccttcatgcctgccccacattccctcacaggtgtcttccctgataagttatcttgtatgtctaatcccatcttggatgcatctcagtcagtaaaaactaacataccaggcttgattctttgcacttagctttttttctttctctcccacaagtagtcagtaaccatgtcctagtgttttatgtgttacctctttttccatatatatatatatggaaaaaggaaggtactgttgaggggcacttcctatgtgccaggccctgtgctaaatactttccctgtatctcatttaatccacacaataaccctgtgaggtagacattatttccattttgccgatgaaaagacagaagcttagagtggtgtaaaactttcctggtgtcatatggctagtgacaggtggatctgagatttgattctaggactatttgacctctaggctaatgatgatggtagtcatatagcagctgacattggttccactgtgtgtggcatctcgttttattgactgcattaaacctttaaaagaaaggtatgaagaaagcactcttattgcagttttcaggtgaggtatcagaggttcagagaaattgagtcttgtgcaagaaatttataactgtaaactcttacattaaaaaagaagaaagatctcaggtcaacaacctactttaatacttcaggatatgaaagaagaacaaactaaacccaagcacagtgaatgagggaaaaataaggattagagtggatataaataaaatggagaatggaaaaagaatagaggaaattaatgaaaccaaaagttgattcttcaaaataaaatcaacaaaattgacaaccattaactagattgactaagaaaaaaagagaaaagtttaaaattcctaaaatcagaaatgaaaatggactctgagcatggtgggtcatgttttaatcctagcactttgggaagtcacagcagaaggatttcttgagaccaggtgtttggaccagcataggtaacctggggagaccctgtctctacaaaaaaataaaaaagccaattagctgcgcatggtgacatgcacctgtagtcctagcatcttgggaggctgaagaaggagaattacttgagcccaggaggttgaggctgcagtgagccataatcacaccactgtattccatcctgggctggcctacagagtgagagcctgtctctctctcttcaacaacaacaaccaaaaaaaaaaaaaaaaaaagaaaaaagaaaaatgaagcgattactaccaattctaataaactaatgattatgaaagtactataaataattgtatgccaataaattggataacctagatgaagtagacaaacccctagaaacacacaaaaatatgaatggaactataatcagtaataagattgaatcaataaaacatttgatgaaattcaatattttttcataataaaaactttctaagaagggaaggaaaccacctcaacgtaaaggcaatatgtgaaaaacccaatgctaacatcatactcaacggagaaagactgaaagctttccctgtatgagcaggaacaagacaagggtgcctgcttttgacacttttattcaacatagtattgaaaggtctagtcagaaaaattaggcaagaatttaaaaaaagacgttaaaattggaaggaaggagtaaaattatttctgtttacagataacttgaacttatatgtagaaaatcctaaagatggaacaaacctattagaattaataaataaattcagtaatgttgcacaatacaaaatcaacattcaaacatcagttgtatttcaatacactaaccatgaacaatctgaagggaaattaagaaaaaaaatttcaatttatattaacatcaaaaagaataaaatatttaggaatgagtttaaccaaagaggtaaaatgattatacctgaaatctacaaaatatggctgaaagaaatgaaagatgacatcaataaattgaaagacattttgttttcatgaattggaagactcaatattgttaggaggacagtgctacctgacgtgagctgcagattcaataaaattcctatcagaatctcagtgacatttttgcagtaaaaaaaaatctgtcctaaaatttatattgcatctcatgactctaaatagacacacagctttgaagaggaagaatgaagctggaggactcacacttcctgatttcagcatttactacaaagccccagtaatcaatacactgtggtactggcataaaggaggacatagaaattaatgaaatataataacccagaaagaaatgcttgcatatatggccaaatgattttcatcgagtgtgccaagatcgttcaatggggaagggaccgttttctcaccaaatgatattgggaaaggtggatatccaagggcaagaacagtggaacctttacctaacaccatgtacaaaaagtaacccacaatagatcaaagatctaaatgtaagggcaaaaactattcaactcttagaagaaaagcttcatgatactggatttcacaatgatttcctggttgtaacaacaaaagcataggcaacaaataaaatggataaatcggacttcataaaaatcaaaaccttttatatatcaaagaacactatcaagaaagtaaaaagcaacccacgaaatgataaaaatatttgcaaattatatgtgtgataagaaattaatttccagaatacatgaaaagctacaagtcaacaacagcaaacatccaaaaacccaattaaaaaatgaacaaaggattaaaatggagttttctccaaggaagatatacaaatatcaaataagcccatgcaaagttcctcagcatcaggaatacttggagatatgcaaatcaaaaccacattgttacaccacctcacacactttaggatggttttgataaacaacaacaatgacagcaacacaaaacaacaggtgttttcaagtagatggaaaaattggagctctagtgcattgctgatgggaatgggaaatgttatagccactgtaagaagtggtgtggctctctctcaaaaaattaaacaataaattaccatttgatccagcaattccacttctggacataatccccatagaattgaaagaaatttgaacaaatatttgtaaactgatgttcagagaagcattactcacactagccaaaaaatggaaacaactgaaaagtccattgaaagataagtgggtaggcaaatgaggtgtatctatacattgaaatgttgttcaaccttaacaaggaataaaattccaatacatagtgcaaagtggatgaaccttgaagatattatgctaactgaaataagccagacacaaaaggataattattatataattccatttataaaagatagttagaatagccagttacatagagacagaaagtagaatggtgggtgctaaggtttagggggagaaggagtgagagttactgtttattggctacagaggtttaatatggtaagaggaaaaagttctggaaatggatagtgtgatggttacacaacactaaattgcacacttagaaatagttaatggtaagtcttatattagatatatataaagtgtccagtagtcttaccctctctataattacacactttttggcactgcccctttcctgccatgcagagccctaggggtgaatctccctatttctccagctctgcatcagtcactgtcctccgtgctgtgtcccaggtgctgtgcccacagcctcatacagccggtgacttcagagccaggacacagctcaggagtctgccctgaggctccctctctttttgtttccctgcagcctggcccgggggaggcttggcttcaactggcaactcgatttagccaaattcaggacaggccaccagggctctttctccacagatgctggtcccacccaggtggagtcaggcagggccagtcaccagaggagcctggagcagagcaggaagcagagtctgagctgctcctccctcacccaaggggcttcctcctctcatctgggggaaaagtgtcagcttgtttcaaagcctcggatgttccttgtagctcatagaataggtacaagaaaacaaagacgtggcagaaggggatgtgttggtgacagcaagaagcaacttgatcttgaggactctccttcttgtccctctctgaatcctcttctaccacatagggctcagggctgataaagcccgctccgtacctttctcaggccagacacaaggtcagccatgagaaaacagaaaaacaaggagaagagagtctgtagagacaaattgggagggttcaggaggagaatttgggatttgcttgtgcccatgggacacaggctgggaataaaaatgttttcctgactcttctctgaaagccagagagactccacctaaaactctattgccaagcatgctgggatccacttaccagagactttgactgtcatggatttggagctttccatgccagtggctgagttacgaacagagcaagcatagagcccgctatgctttgtagtaatctgggggataaagagcttttgtcctgatagctgaaacttcccattaattgtccaagaatattctgctggtgggttagagtccgcgaagcaggacaagtagaggttttctcctgaatggtaataggtgaatgaagggtaaattctggggaggtctggaccatctggagcaaagagaataaagccacaggtgatgtcatccgagggaaggggatgctcctggtctcttaaagggacacagtgaccctctgagccaagacacaccctcaagtgccagccaaaccccctctatgttcactgagctgaagcctgaggtattcccctgtttctcccatcacaagctgtgggccccaagtctcccatgacaagagcgtcccctccccttatattcttggttaaggctgtgcctacccagatcttcccagggcaggaagttatggccagctcggatgtccagaagtaatggtatctatacttggaccagagagagagtgagaggcctggcctctggtcgttttgatttaagctggtgtcctggcccacagaggaacaaaagatactcacagaggacattcagggtgactgggtaactgcggatgccaccatatcggtcctgtatttcacattgatagggtcctgtttcatttctcgtgacactgggtagaatgaggatcctgttttcaatgggtcgctttaccctgggactgaccgggaggctctgaccatttagccaccaaatgtaggtgtagttctcactcttaggttcacaggtgaaggctaagacatccttattctccctggggtttaagttgttgatggtgatgtagggcttgggcagcttcgctgtgtggataacagagagaagattgtcctgtgtggcacctttgattcctccactggcatccttcaatcagagttggcatctcccacctctcagcccacccgagtccttgaaagccaatagctggtgcgtgtgtcacaagacagatgcatgatgatctaagggctcaaagactgtgaggccagctgctctgtcttagggaagcacagactttctcaagtgtcaattgagcagcagtgttgggtcatggacagacacgtcaatgggagtcacagcccctggtacccctcccagtccctccataatcagttgactggctggctcaccctgggttccttacctggaatgtgcaactggtgggccccttccaaattccatcctactttgcccccatagatgtgatttctctgcaacttccatttccaaggacattctagagatgagtaataatgggacttcccatggccctgaaaccctgaagatactgagcagcctggcctgggactggatgtttcagcagaaataacacaggggagaccagaatcaagcctggaggtcagttcagtcatcaggcagtggaggctcaaggtggggcagttttttgcaggtgtttcatgatgacttacttgaaccagtgacctctaaagatagagcagagtgcaaggaatgatctagaaagagtgaaggtgacaggcaagagctggtggctttggagcagaagcatgttccctgtcttgggttctttaagtttcctctccttctgcagagggcaggtgaggaccatgtggatctttccagaaatacatgtggacatttgcaaatgcagcactgactggtggaaagggtgggaatgaactgctggaaatctggtcctcatggaccatatgtgtttgatggatatgagacaaatttggagagaagttttgcaaatattttctttcattggacattctactcaatgattccatgggttcgactactctagggacctcatgtaagtggattccagagtgaatatgagaagagactgctggttgccaggagctgggagtggggagaatcagaagttgttcatgggtgggcagtttcagttattcaaggtggggaggttctagagatctgctgtagagcttgatgcctatagttcacacagattgagtatttcttatgcataagacttaggacaaaaagtgttttggatttctgacattttttgattctgaaatatttgtcatatacttactggtttagcatcccaaatctgaaagactcaaaatctaaaatgcttcagtgagcatttcttttcagcatcagattagtaggcaaaagtgggaggtgataagccaaagatattcttgccctttttttttctctcaccacttttctagcttggtgattagttttcggtgaattccatactggccatgctgcacttgtatatttttgaaggccttgggatgtgagaaaggctgattgctattttctatgtcatcagaactttccaccttttcatggttgcctctttttctcagtgtatctgttgtggcagtcattaataagagcctgtcaggtgagatttaggacagtgttttctaattctgcaaaaaatgttactgggattctgttaggtgttacattgaatccgcaactcactttgggaatattatctttctaacaatattgattcctccaatccatgaaaatgaaatgtgtttccatatattgatatcgtctttaacttgtttcagcaatcttttgtagttttcagggtataatcatttgactttttggttaaacttatttcaaaatattttattccttttgatgttaatgtgaactgaaattctttccttaatttcctttcagattgttcattgttagtgtatagtctaaagaatgatctagaaagagtgaaggggacaggcaaaagctggtggttttggagcagaaacatattccctgtcctgggtttttgattttccctctccctttgcagagggcaggtggctcttccctgatagctagatagacttcactggaaaacatagtgccaatgctccagggatccacttaccagggactatgatcctcttgattatgagatttgttccagcagtggctgagttatggatgaaacagacatagacccctctatatgttttagtgatttgggggataaagaacacttgtgctgattgctggaacttcccatcaatcagccaagaatgctctgccagtgggtgagagtctgtgaggcaggagagcttgggggcttcccctgtatggtaataggtgtatgaggaggaaatggtgggggcatccaggccatgtggagcaaagagaataatgtcataggtggtattgtcagagggaagggaaaatcctggtctgtggaagggccacagtgaccctgtgagccaagttgcaacactgaagtcccagccaaatccctgctgtgttcactgatctggagcctgagacagtcacctgttttgcccatcacaagctgtggacgctgagtctcccatgacaggagcagcctcttttctcctattgttgatcaagcctaggcctactctggtttgcctggggcagaaagtcatggccaggtttgatgtccaggggtaaaggtctctgtacttggacctgagagggactgagaggcctggcctctggccacgtgtatttgggatggcagactggctcacagaggaacaggagatactcacggaggagattcagggtgactgggtcactgcggctggcactcactgggttccgtatttcacattcatagggtcctgcagtgtactttgtgacaccaaatagaaagagggtccttttgtttttggacaactgcaagctgtgagtcatagggaggctctgaccattcatccaccacaggtagcttgcgtccggagtctcaggatcacaggttaagctcacagcctccatgtcctccctggggtataagttgctgctggagatggagggcttgggagtctccactgtgcagaaaacagagagaagattgccctgtgtggcacctttgattcctccaaaggcatttttcaatcagagttggcatttcccacctctcagcccacccaagtccttaaaagcccatggcaggtgtgtgtgttacaagacagatgcatggcaatctgagggctcagagattgtgaggctgcctgcttcgtgtgggagaagcacagactttcttaactgtgaattgagcagcagcattgggtcacggaaagacacaggaccagcagtcacagcccctggtgcctctctgagtccctccatctcgaagtgcctgcctggcccaccttgtggtcctcacttggagcatgcagtgctggaatcttcttagtttcagtcttactttgccgcccgaggtatgttttctctgcagcttcccttgccaaggacatcctagagatgggtgatggaacttccaattgtctttaaaccctttggatactggaaagcctgacctgggactgggtacttcagcagaaataacacaggggagaacagagtcaagtccggagttcagttcagtcatcaggcagtggagccacaaggtggggcagttttcccaggtgtctcatagtggctgacttgagccagtgacctctaaagatagagcagagtccaaggaatgacctacaaagagtgaaggggacaggcaagagctgatagctttggaccaagaccacgttccctgttctgggtccatgatgctcccttccccctgtagagggcaggtgaggaccatgtggatctttttggaaatacatgtggatgtttgcaaatgcagaaccgactggtggaaagggcgaacatgaacagatgatggaagtctggccctcatggaccatatgtgtttggtggatattagaccaatatttgggaagaagccttgcagatactttctctcattagacattctactctctgattctgaatttgactactctatgtacctgatatcagtggattccagagtgaatcagagtgtagaatagtagtttccaggagctgggatcaggggaatagggcgttgttctgtgggtgtgcggtttcagttatgcaggatgaggaggttctagagatctcctgtacagcttcatgcctatagttcatacagataaagtgctccttattcagaaagcttaaaaccaagtgttttggatttctaattttttttattttggaatatttacagtacatgtactggtttagcatcccaaatctgaaaaatttaaaatccacaatgcgccagtgagcacttctttttagcatcacatcagtggtcagaagggttgagttttggagcatttcagattgtggatttctggatttccgatgctcaatttgtaatactgtaattttcccataaaaatttgtcaggagtttagaccttatgttctgactctagtaacaacaacagcaaaaaatttggaggaaacattgaaatgttttcataagtggaaatttttactgatgatccaaacatctaagatcaattgctggtagtagtatttctcttgagaccaaaataaggtttaggtgtgccgtgaattccagcaggatcacattatgctcaaagaaagatgccaaaggtgatttgaaattagcaactccttaagtagagagagtcccgttaaaaggacagaactggttagtgtgtcaattgcataaagggaggaaggatgccaaactaaaagaagtgatgtgtgttatgttagtaaatatagaaagaacctgcttctaatttctgtgcagagttaggaaaaatggggaggaccccaaaacaggtatgtgaaatgctttcttcattttctcttaagctcaggaaacaccactagtgtttaagtttgtgtgaattagaaagagtctaagtgagatgccaatggtttgtgtgtctccccacacgcagaactccaacttatgaaaacggcatcatcatgaggaaacagttgtatgtggcacaggcagtaaagccatcagatagcacccacctggccacctccacctggtccccaaaaccaccagtattcccattacgtgtatcttatagcctttgtagttgtcccacagctacaaaatttaaaaattgctattgtcaaatcaaaatattaaatatgaagttgaaatgttgttccactttttttccccactcttgttgaactttcctgtttcagttttggaagtttctattgacatatcctcaagctagggattctttcctcagctatgttcagtctaccagtaagtatcaaaagcattcttcatgtctctaaaaacatttttttttttctgagacagagtctcgctctgtcacctaggctggagtgcagtggcatgatctcatctcactgcaagctccacctcctgggttcatgccattctcctggcttggcctcccaaatagctgggactacaagcgcctgccaccacgtccagctaattttttgtatttttagtagagacggggtttcaccatgttagccaggatggtctccatctcctgaccttgtgcctgcctcggcctcccaaagtcctgggattataggcatgagccactgtgcccagccatctctgagggattttaatgagttgttgacttttgagtttgttcagctttttacttagtgttagaaccgaggaacaaatttcaagcttgttatatgcctgacaggaagccagaagtctctaggaagtgaccggagaatgtgagctttatagcaggttgaggatggagtcacaagtgaaatgggtgaaatgagcccatggggtttggggactgcaggcctgtccagcctctgacactctggtgagtcagtgctaagattacaacagtgacagcaaactagcatggctgagtccatctggtatctagtctcaggctggctgtcctcactcattcctgggcataggccaggctaaccttgggaggaatttagtttattgtttaactttgaagcaagaatgataattgttcctctgtaaaagtaacacccttactttgcccagggactgcctttgtaaaactagtgaaagaccatgagattaagattataggagggaactgaattctgctaaaatgttggcagagtttttataatccttgactgctcaaatgtcgttgggccagagtttacaaaatttgtaactaattgctcctatagataacatcactattgtagaacgtgagattggtcttttgagatgtttctcattcttttgcattctggcaaccggctgacctcatccatacctatgactaatggctcagcccgtcatgtggtccctacctagaggtggattcaagcacaaacagatcatttccctccgcccgcatgattccatcaccaatcagcagtactcattttttagtcctgtgcccctgaaactatccttgaaaatctctaagccctgatccactggggaggctgatttgagtaataataaacctccatcctcctgtttggcagacttggagtcattaaaatctttctttactacaaaccaccatttcaatacatttgtgtgtgtgtgtgtgtgtgtgtgtgtgtgtgtgtgtgtgtgtgtgtgcaggaggccagaagaacttgtctggcaattataagagtggatggagaaactgcctatccctgtcccatggtcttgtccacaggtcagcctcacaaagggaaagagccctggatgggaatacagtggaaactcattctcttagtgacctggggacattggctctagaggaagcctggcaggagtggcaactccaggtgatttctgcacctttcctatttcctgggaggtgggccaggccacagtgttagcgggaagggaactgaacagtcagcctagttagagggagtgtctggggaagacctaggggtgggggaagaagctgtgcaggacagggcttgccagtcagaatgaagtgggaggaagatgagggacacagagaagcagagagaggcagagacaccatggcagtgagcagtgagggctacactgacttcagagaccccagggaccaggtgcccccagttccacagtccaggaccaaggagccctgagaaccctccggtggccaaagagcttcagagttacatgaggtggggttgctttagggtcaagaggtagtggggggatgaaacgtgggtgtcagcctctgaaggacaagggacaggtgtggctagaacctcctaggattctgcatgcaaattcagtctctaaagaggttttggatcattcatttcttcattccatttcttcatttgttatgtaagagctcctgagtgtgtctgtctcgctgggcctatggtggtgtagggtgtgagtggggaaagaaaacaaggtcctctccttgatcctcttgtgacagtgacatggacactttgggaaacacaggatttcaggttcagtgatggtggttaagatctgagggggaggcctggacatgttttttccactgactctgacggttgaggtaggtgatttagttctggaatacagactaatcagttgaccgtttgctctcactcctctgaggtttggatgcctaagaagagaggatttgagccaataaatgactatagggtgattggaacccagtaagccctcacttctggtggaggagagggtgggcctttggctccagacacacctcatgtgaccctgatctcccctttgtgtttgtgtgactctggttcagtgactgtggcttcctgtgcctcagttttctctcaaacaaataagctaaatggcaaatggactgtggcttttcatgctatctgtgaataaatgttaaatgattcacagtcacgtgacctaattcttggcacagtggaggtttcacacaaacagcatttattattaatttgcttccatgagaaagcacctttatgtcagatgcctgtggacaagctgctacctggtatatcttctctcctctgtttctgcttctggggacattagactttctatggactggcctaagcctcctaaggcagttgtctgatggcctacaaagcttgtctttctgtcctctccactctgagtgtcaggtgaagaaagctctgtccttgcccagatgaggctctgagggctgagccctggctggtgaacagctccaggagacacagtcctctgacagctggtaaatccttggtcccagtaagccctgcccaagaagcgacaacccagccccagtacaggctcctcagatttatctggagcaaggatttagggacatggttctgggggtgaggcttctagggctgagcttctctgagagtatttcatggggcccctgaggccaagccctactcagtttgccagggtctttctcagggtcaaatttatgaagagagcatgaggtgcttggctgagactgatctcctcctgctgagtccccccatcagactgtccttcctctgcagcgagtgtctgcagggtctggatgcgggaaaggaattctgatctgttgaaatttgtctcttctgtgtgtgtcctgcactaaatgcccaaaccccagcatgggacataatgcagagagggacacaggcacaatccaggcctgacaatcctttgtgtgtgaagtaaagaccccatcccccaacacccagtgatcacgtggagtcactcacggtataaggtgaaggtgaaatgtccagtttctcctctagtcccatcacctcgctttacgatgtgtaaggtgtaggatcctgcgtcctcccgggtgacattctggatcagcagggatgcattggaatatactgtttctcgtccactgtatgcaggcccatatataattatttgaccatctactacgtatgatgtaatgtaatggtagaggtccttcatttgccctttgtaccagatgtagccagcaagattctggggcaaattgtggacaagtagaagaacgtccttccccttggaaactttggttggctcggcttcaatcgtgacttgggcagtggtaggcaagttccagaagtttaaaagtaatgctaggaggtggagagagcatcagtcaatattgagacctatgcattggggtgaaaagatgtggccctgggtcctgagaaggtctcttcaatcctcagctttgaagagacacacacacacacatacaaacacacacacacacacaaaaggggcatgtgtatatgtgtttgtgtcctactctcctactaggtgaaggtcagcaacatgacccccattccttcaacacttctgaccttggcatttttctgtttggaatcctcttccccaggggtccgcacggccccctccacactgccctcaggtcctgctcacatcagggcatccttagacttctttcctgacgcctccttcagagaccctgggtcttccctttctgacctttccctgctctgctccctccagggttcttctcaacacctgacctcacattctagaactctttgcatgtctgtcttcccccccatgacagcgtgagctccgtgaggacagggacttttgtgatcttctttgcaccccagtgcctggaacaggctgcagactcctgtagatgtgagagttctcagggccctccatgccctgggtgttttttcttcccccagttgttgaggtttttttgctgaggacagtgtttcatgccctgcttatatttttatttgaagtgtcatctgatatagttattattatcatttttcaaaatgtggtggcccctgatgattaatcaggaaaacagaacacttaagattttcctacctcttaccaattctggttcctgtgactttcctgttttgacccctgtccctcttgggtgtattttcccctatccaggctccaacagagacttctttcctttttttcttttttctttccattcttttttttttttgagacggagtcttgtactgtcgcccaggctggcgtgcagtggcactatctcggctcactgcaatttcttcctcccgggttcacgtgattctcctgcctcagcctcccgggtagctaggattactggagcacaccacaatatctggttaaatttttgtatttttagtagagacagggcttcactgtgttggccagactgatcttgaactcctgatctcgtgatccaccctcctcagcctccctaagtgctggcttcttttattttttagaaccccaggagtctctccaggagaccccatccagtcactctgcttcctcctcctgtcctctcccaggaagttctctcctcacctgtgagcaggagccccttccaggtgatgcgctgtgtgcagggaggggctgagaggggccccatggtctctgctgcctgcgtgttctcctctgtggagctgagcctaggatccagaaacttcctgagcatggctctcagctgtgctgtccttcctccttctgcgctgagcctcttcccggggcaggagcacttctcaggttcatgggcggggtcaggcccaggacacctctctgtcccctcctctctcagtcctgcctccttgtccctcctgtttttccttttgtctgtgtttcaggtccctgggaattgtggaggcctctgcctttttcagcagtgattctttcaccaagcctcatcacacactttgtgcagacacacacacacacagacacacacagaagagacacacacagacccacacagtcagaaacataccctgcaggttgggcaagcagagtcctgggcctcagcctcctgctgtccccatggctctgggtcggggtgcacattcatgccctttggcctctttcatccccatctggctctccccttcagtgcaggaggctggagctgaaccaggtccctgtcacagtgacaccccattgtgctgtgggtgagctgtgtgttgcctgatgagagggaaccttcctttttctaatcgtgtctagcttggctgcagcttccaaggatggacattcaggacctgggtgtcccagaggaaactgtccttcctggaggtgtgcaggatgaatctctcatgcctcttgtgaggagaggcctgtgctggttgctcagtggggggctgtgagtcccatagtcaaagggacagttctcggtcactctatggctccctggggtctggcggctgagctggagctcatggtttctcatgttcttcctgaccatctttgatgtcctctcttctctgcccagcttattgtcctgtggtcaccacaccttccccgtggtggtgcaggaggaagtggggagttacccaggaaccccgggggacatggctcattgagatgcaggagggggagcctgggacagagcaggggttcagagctggagagattcatcccaacttactctgtggccatgatgggctcagccatccatgtgccgacatacccaggggtctgtcctgaggtttttgacctggccaagctgctgtgtgtagaggaggaacaggtagtggccagagagcctgtctggagggacgttgctcacacctgagtgggcgtgtgggggtgagttgtgttctgggagcaaagagcaataacatcccccttctcccagcaagcacacaggagaggtctgtcttcccaagggacagctgggggtaggtggccacatcccggatggtgcctgtgtgtgagcatcacacgtgctctgagccccccggggtgcagggagcaggcaggacacagggtgcctggctgattcccggggaggctgtgggccctcaggcagccactgttctgtgtcagtgctaggcttggcctgggatgccccagagaacaggacagatggagcaggggcaggcatttagggagcagtgacagaacgagttgatgaggatggagggaggccacgaggggaaagcacccagtgtagtgtcgcgtgcaccagcactgccctgggagatgcctttagctgggcccagggaaggagcaggtgtgtggggaggagctccctgcagggggagtggtgttaggttggcggcccccaggtcagggaggagctgacagagtccgtgtggggagcatggagggcgctgaggacttgggccgaagtgaccctggtgagggtggaccctgctgggctgtgggttccgttgagggcggttggcatcccctgggaaggctccaggctgggagggactctgtccccctctggtggacagggagggaaatgtgaacggcagcaatcccaggccaggctgcatgttttattccacatggatctgcacacttcacacgaggtcacacatatgttatgttatagctccttcaccttccagccccgtgagtcccagtctgtgtggctctatgttcactgttctccctctttcacaatcagatgtcccaaatgcagatttttgtcaccttctgtgagtttgtgtttgtgtgcagtaggcagcactgtgtataccctgggggcagtgatgtctggggctgagcagtgcacatgggcttgggagaagaagagggagcagcagggtgggaagatcaatgtcaggggggcaaggacaagtcattttcattttctcactcccagggaccagaacccaggattctgactccagggcacagtaccacaccctgctggtgtccctggatgtcatgatgctcatagtgtcatgttgccttgtcattcatcttttatggtgtaagtttatttgcctcaaatcagaggcagggcttggtcaccaatgcagtttcaatactgtatctggttcaggtggctccagttggtgtgcagagataaaatcttagaggcatctctcctgcttggtgtgctgggtttccctctctccagctgctttctttaaactgataattctgacatttgccctcacatttaaagtgaccacctctcagtcacagcgtgagcccctggtcccagtgtttgctgcttgctttgaacacatccattaaagctccctgctggaaacctgtcagataacaccctggacttaataaagccattggcttaccggtctcttctctcctctctccatgggctcactgacctctgtgtctgtggtctccaggtgtgccaagtgctccccagtgtctgtaagtagtaaaaatacttacactttcacgttgtggttgtatcactgtggcctcacatgccatccagggtctgatattgaggctgccttatgggacctgtgctggttgagcccctgctggagctcttgttttggggcgtctggttctgctggggacaggagcttccagctaacttgattgaaaatctgatgcctttcattgaaacactgggtcagatgatgtattcatgggcttcagctgccataacagacaccttagcctgggtgaattaaataatagaaatctatttttcacagttctgtgaataatgtgctattttaaccactttaaaatgcataatcaagtgaaattaaccacttacacagtgttaaattaccatcaccagtatttttcctagaaaatttttatcattttaaactgaaactttgtatcttttaaacaataactccctgtatgttccaccttagaccttgatcttctctactctgtctctatgaatttgcctattcttgatgcttcatataaatggaattatacaattatgttattttgtttctgacatatttcacttagcataatgtttccaaagtccatgcatgttccagcgggtgtcagagcttccttcctctttatggcagattatcattctgttgtatgtgtcaccatatttgtttattcatgtgttgatgaacacttggattgttttcatattttatcttttgtgaataatgctgcaatgaacattcccatgcaagtacctgtttgagtccctggatttaattctttgggtatatacctaggaatagatgttgtttcaaatgagaattctatgattagcttttttttattattatactttaagttttagggtacatgtgcacaatgtgcaggtttgttacatatgtatgcatgtgccatgctgttgtgctgcacccattaactcgtcatttagcattaggtatatctcctaaagctatccctcccccctccccccaccacacaacagtccccagagtgtgatgttccccttcctgtgtccatgtgttctcattgttcaattcccacttgtgagtgagaatatgcggtgtttggttttttgttcttgcgatagtttatgagaatgatgatttccaatttcatccatgtccctacaaaggacatgaactcatcattttttatggctgcatagtattccatggtgtatatgtgccacattttcttaatccagtctatcattgtttgacattttggttggttccaagtctttgctattgtgaatagtgctgcaatatacatacgtgtgtatgtgtctttatagcagcgtgatttatagtcctttgggtatatacccagtaataggatggctgggtcaaatggtatttctagttccagaatcgccacattgacttccacaatggttgaactagtttacagtcccaccagcagtgtaaaagtcttcctatttctccacatcctctccagcacctgttgtttcctgcctttttaatgattgccattctaagtggtgtgagatggtatctcattgtggttttgatttgcatttctctgatggccagtgatggtgagcattttttcatgtgttttttggctgcataaatgtcttctgttgagaagtttctgttcatgtccttcacccactttttgatggggttgtttgtttttttcttgtaaatttgtttgagttcattgtagattttggatattaaccctttgtcagatgagtagatttcaaagatttctcccattttgtaggttgcctgttcactctgatggtagtttcttttgctgtgcagaagctctttagtttaattagatcccatttgtcaattttggcttttgttgccattgcttttggtgttttagacatgaagtccttgcgcatgcctatgtcctgaatggtaatgcctaggttttcttctagggtttttatggttttaggtctaacgtttaaggctttaatccatcttgaattaattttttagaaggtgtaaggaagggatccagtttcagctttctacatatggctagccagttttcccagcaccatttattaaatagggagtcctttccccattgcttgttttctcaagtttgtcaaagatcagatagttgtagatatgcagcagtatttctgagggctccgttctgttccattgatctatatttctgttttggtacctgtaccatgctgttttggttactgtagccttgtagtatagtttgaagtcaggtagcgtgatgcctgcagctttgttcttttggcttaagattgacttggcgatgtgggctctttcttggttctatatgaactttaaagtagatttttccaattttgtgaagaaagtcattggtagcttgatgggtatggcattgaatctgtaaattaccttgggtagtatggccattttcacaatattgattcttcctacccatgagcatggaatgttcttccatttctttgtatcctcttttatttcattgagcagtggtttgtagttcttgaagaggtccttcacatccctagtaagttggattcctaggtattttattctgtttgaagcaattgtgaatgggagttcactgatgatttggctctctgtttgtctgttgttggtgtataagaatgcttgtggtttttgtagattgattttgtatgctgagactttgctgaagttgcttatcagcttaaggagattttgggctgagacaatttggttttctagatatacaatcatgtcatctgcaaacagggacaatttgacttcctcttttcctaattgaataccctttattttcttctccggcctaattgccatggccagaacttccaacactatgttgaataggagtggtgagagagggcatccctgtcttgtgctagttttcaaagggaatgcttccagtttttgcccattcagtatgatattggctgtgggtttgtcatagatagctcttattattttgagatatgtcccatcaatacctaatttatggagagtttttagcatgaagcattgttgaattttgtcaaaggccttttctgcatctattgagataatcatgtggttcttgtctttggttctgtttatatgctggattacatttattgatttgcatatattgaaccagccttgtatcccagggatgaagcacacttgatcatggtggataagctttttgatgtgctgctggatttggtttgccagtattttattgaggatttttgcatcaatgttgatcaaggatattggtctaaaattctcttttttggttgtgtctctgcccggctttggtatcaggatgatgctggcctcatgaaatgagttagggaggattccctctttttctattgattggaatagttcagaaggaatggtaccagttcctgcttgtacgtgtggtaaaattcggctgtgaatccatctggtcctggactctttttgtttggtaagcgattgattattgccacaatttcagatcctgttattggtctattcagagattcaacttcttcctggttcagtcttcggagggtgtatgtgtcgaggaatttatccatttcttctagattttctagtttatttgcgtagatgtgcttgtagtattctctgatggtagtctttatttctatggaatcgctggtgataacccctttatcatttttttattacatctatttgattcttctctcttttcttctttattagtcttgctaggagtctatcaattttgttgatcctttcaaaaaaccagctcctggattcattaattttttgaagggttttttgtgtctctatttccttcagttctgctctgattttagttatttcttgccttctgctagcttttgaatgtgtttgctcttgcttttctagttcttttaattgtgaagttagggtgtcaattttggatctttcctgctttctcttgtgggcatttcgtgctataaatttccctctacacactgctttgaatgtgtcccagagattccggtatattgtgtctttgttctcgctggtttcaaggaacatctttatttctgccttcatttcattatgtacccagtagtcattcaggagcaggttgttcagtttccatgtagttgagcagtttaaagtgagtttcttaatcctgagttctagtttgattgcactgtggtctgagagatagtttgttataatttctgttcttttacatttgctgaggagagctttacttccaagtatgtggccaattttggaataggtgtggtgtggtgctgaaaaaaatgtatattctgttgatttgaggtagagagttctgtagatgtctattaggtccgcttggtgcggagctgagttcaattcctgggtatcctttttaactttctgcctcattgatctgtctaatgttgacagtggggtgttaaaacctcccattattattgtgtgggagtccaagtctccttgtaggtcactcaggacttgctttatgaatctgggcgctcctgtattcggtgcatatatgtttaggatagttagcccttcctgttgaattgatccctttaccattatgtaatggctgtctttgtctgttttcatctttgttggtttaaagtctgttttatcagagactaggattgcaacccctgccttttttgttttccatttgcttggtagatcttccgctatccttttattttgagcctatgtgtgtctctgcacgtgagatgggtttcctgaatatatcacagtgatgggtcttgactctttatccaatttgccagtccgtgtcttttaattggagcatttagtctatttacatttaaagttaatattgttatgtgtgaatttgatcctgtcattatgatgttagctggttcttttgctggttagttgatgcagtttcttcctagtctcgatggtctttacaatttggcatgatgttgcagtggctggtacaggttattcctttccatgtttagtgcttccttcaggaggtcttttagggcaggcctggtggtgacaaaatctctcagcatttgcttgtctgtaaagtattttatttctccttcacttatgaagcttagttgggctggatatgaaattctgggttgaaaattcttctctttaagaaagttgaatattggcccccactctcttctggcttgtagagtttctgccgagagatccgctgttagtctgatgggcttccctttgtgggtaacccaagctttctctctggctgcccttaagattttttccttcatttcaactttggtgaatctgacaattatgtgtcttggagttgctcttctcgaggagtatctttgtggcgttctctgtatttcctgaatctgaatgttggcctgccttgctagattggggaagttctcctggataatatcctgcagagtgttttccaacttggttccattctccccgtcactttcaggtacaccaatcagacgtagatttggtcttttcacatagtcccatatttcttggaggctttgctcatttctttttattcttttttctctaaacttcccttctcacttcatttcattcatttcatcttccatcactgataccctttcttccagttgatcgcatcggctcctgaggcttctgcattcttcacatagttcttgagccttggttttcagctccatcagctcctttaagcacttctctgtattggttattctagttatatcttcgtctaaatttttttcaaagttttcaacttctttgcctttggtttgaatttcctcctgtagcttggagtagtttgaacgtctgaagccttcttctctcaactcatcaaagtaattctccatccagctttgttccattgctggtgaggaactgcgttcctttggaggaggagaggcactctgctttttagagttccatttttctgttctgttttttccccatctttgaggttttatctagttttggtaattggtgatggtgatgtacagatgggtttttggtgtggatgtgctttctatttgttagttctccttctaagagacaggaccctcagctgcaggtctgttggagtttgctagaggtccactccagaccgtgtttgtctgggtaccagcagctgtgtctgcagaacagcggattttcgtgaaccacaagtgctgctgtttgatcgttcctctggaagttttgtctcagaggagtacccggccgtgtgaggtgtcagtctgcccctagtggggggtgcctcccagttaggctgctcgggagtcaggggtcagggacacacttgaggaggcagtctgaccgttttcagatctccagctgcatgctgggagaaccactgctctcttcaaagctgtcagacagggacatttaagtctgcagaggttactgctgtctttttgtttgtctgtgccctgcccccagaggtggagcctacagaggcaggcaggcctccttgagctgtggtgggttccacccagttcgagattcccggctgctttgtttacctaagcaagcctgggcaatggtgggcgctcctcccccagctgcgctgctgccttgcagtttgatctcagactgctgtgctggcaatcagtgagactccatgggcataaggccctctgagccatgtgcgggatataatctcctggtgtgctatttttccagcccatcggaaaagcgcagtattagagtgggaatgacccaattttccaggtgctgtctgtcacgctgggagctgtagactggagctgttcctattcggccatcttggctccaggaccctataattagctttttgaggaacagcaaaactgtttctcctagtggctgtacctttttatattctcaccagcaatgtatgaggattccaaattctacataatgctgccacttgttattttacaatttaaaagaatggtagccagttttgtaggtgtgatgtggtgtctcattgcagctttgactttgtattttcctaatgactaatgatgttgagtatcttttcatgtccttcttgactatttgtatatcttctttgaagaaatgtctatttgagtcttttgtccatttataaattggatggtttctcactttgttattgagttgtagctagttcttgatattatctggacatgaaaactgcctatatgtggtttgcaaatattttctctcattccttgtctattaattattttcttgatattttcctttgatgcacaaaatgctcacatctttataaagcccaatttatcttttttttgtttcttatgcttttgtgtcatatctaagaatccattgcacatttgaggtcattaatatttacctctatgtctattttaagatgtttttatggttataggtcttatatttaactcactgatcaattttttagagaattgtttgatatggtgggaggtagagttatctaaattcactgttttgcatgtggttatctagttgtttctgcactatcattagaaaggagaattgttcctccattaaattgtcttgacaccctcttcaaagagtaattgaccataagtgtgagggtttatttctaggctctcaattctatcccatttgtctttatgtccattcttttgccagcagcttatgtctattctttggcagcaacttctgttttaataattgtactgctttgtgagatttcaaataagaaaattcaagtcctacaatttattttggcaagattgttttggctattcaggggtccttttttgaaaggtggggaggccaatgtttcacaattgggaaagccatttctgtcttcttcatggggaaatttgggagaatcttttaagaaacttaatctaagtaggtaaactgtcaccactttatttgctgaagtgctgtgttaaagtgtgcattgactcttgtggaagaattgtgactctggaagcacttgcccacatggtgagagacagtgaattccatgatgaggggcagagatgatgttgttttgggatacaatgttgttgggggagttgtatacatctctacttctttatgtctctgtacagtgggtgtagggaccagccacacagggtcggtgggtttttctctccatatgcagagatgagagattgtagaaataaagacacaagacgaagggataaaagaaaagacagctgggcccgggggactactaccaccaagacgcagagaccagtagtggcaccgaatgccaggctgcactgatttttattggatacaagataaagtgtcaggataaggagtgtgagccatctccaatgataggtaaggccacaggggtcacatgtccactggacagggggcccttccctgcctgtcagctgaggcagagagagagaggagaaagagagagagagcttacagcattatttctgcttattagagacttttagtactttcactaatttgctactgctaactaaacagcagagccaggtgaacagtatggaacatgaaggcagactaggagtgtgaccactgaagcacagcatcatagggagacggtcaggcctccagataactgcgggtggacctgactaatgtcaggccctccacaagaggtggaggagtagagtcctctctaaactcccacggggaaagggagactctaagtagctttcccagtctgctaagtagctggtgtttttccttgacactgaggctactgctagaccagggcccgcttggcaatgggcatcttcccagacgctgtcgttaccgctagaccaagaagccctctagttgccctgtctgggcataacagaaggctcgccctcttgtcttctggtcacttctcactatgtctcctcagctcctatctctgtatggcctggcttttcctaggttatgattatagaaatgaggattattttaatactggaataaagagtaattgctaccaagtagtgattaataatattcatatataatcgtatctaagatctatatctggtataactattcttcttttatatcttattatactggaacagctcatgccctcggtctcttgcctcggcacctgggtgacttgctgcccacaagtgggcatctccattggacacagtaggttttgaaatccttgtttatcctctggggtctgggtcttggcttacctgttagctgcagctgaaagaggtgtctgctaaggcaatgccacctgtggtgagaagaagggttcagcagagtgaaagcagctggggctcagagaaaccaggaaagtctgactcttagaaactgtgggtcagcagatgggtgtcctcaggggtaaatggaccatgccagtagccactgcagtggactggaagaaggtaagggatgccagttatcgcatgttctctctcagctctgcagctgaagatttgggccctgggttggtaaggccctgcagcaggggaagggtatacaggaatagctgcatatcaggaccaagtccatgtcatcttcttaggcattgttactgcagatggaggattcttttcagagacctggcctggacacatgggagggcccaccccattcttttgaaattattttaagagaacagtattagcaaatgtggtacatgttttattctgctagaatcagtattactgtcacattttacaatgtatctcttaggaaatggcgagagccatccacagaatgtgcatttaaaggggactctattataatttcagctttcctacctcttcatagaaaccatcttatctgcaaacacacgggcaatatctctgtgttcatttctattgggagtcctgtatgcaaggtggagagagccacatttccccctgagatgttatgtaaaagtttgggttgagatgacatatctgacactctattgttaccctcagaagctactacatgtgaaattctaatgactgcattatcctgccaagtgaaagaggcaggcatgagcaaggacagttaagaggggtgagagcctcatcatgatggggagtcttgttctgacatcttgggaaaaactgtccacagtgtgaagtcatccacttgttgtcctggtttacagtttgagcatctgttgttatggtgtcgaacattttagtgagttctgagtggctcacccttcaggtacaagggttttcccatgaaatttacattgagttgtccacctccagcttatagggcttctggaacagagtgggtctttttcttagcgattccatggaagaaaatggaattggaggaactagtagaattcagggtaatgtccagtctacaggtggataataaaaacacagaaacaatgaacagagatgcaatctcataacaggtgtactacagtttttattttccacataatttttctctctatgggcatctctagttttaccaatgataatttcagtagaataagtttgtttgcaaaataggttgagtttcttcaaacgtggtctgattgtttacataagtgcagcaagagtagcaatggaccgtgtaggctctcttttaaaattttcttttctctaagtttttataaggaatctgagattaaacttttacaaaactcttgagaataggaagccaaaccaaggctgacttcagactttgcctgcagttcatactggttcattctatctatatccttaaatataacatcccagtcaaagccttggtaatataaccaatgatttgaaatgtgtcctgttacaaagagagcagattgttgctgtacttgtgcaaatatgtgtattaccataaacatatcaattctcatgaatagttgcccaattctggggcagtcaggtagaaagcaaaagtaaatatttcaattacagttcaataaactgcggtatagtttattgaactgctataagctacagataggttaaaagagaaaaattccgtcaatgtagaaaacaaaccatttaaagaatcagcaaattttcaaatgaaaatcataaaaacattatcctcattattatcaattatttcattgaaatcaatgtttttcctgcttggtctaggctgggaattttatgaagatatcagcctgtttgttaaagttttcaaagttcttagacaaatttggagggtttaggaggagaatttgggatttgcttgtgcccatgggacgcaggctgggaataaaaatgttttcctgactcttccctgaaggccagatagactccacctaaatccctattgccaaggatactgggatccgcttaccagagacttttactgtcatggatttggagctttccttgccagtggctgagttacgaacagagcaagcatagagcccgctatgctttgtagtaatttgggggataaagagcttttgtcctgatagctgaaacttcccattaattgtccaagaatactgtgccggtgggttagagtccgcagaacaggacaagtagaggacttctcctgaacggtaataggtgaatgaagggtaaattctggggaggtctggaccatctggagcaaagagaataaagccacaggtgatgtcatctgagggaaggggatgttcctggtctcttaaagggacacagtgaccctctgagccaagacacaccctcaagtcccagcccaaccccctctatgttcactgagccgaatcctcaggtattcacctgtttctcccatcacaagctgtgggccccaagtctcccatgacaagagcgtccactccccttatactcttggttaaggctgtgcctacccaggttttcccagggcagggagtcatggccagctcggatgtccagaagtgaaggtgtctatacttggaccagagagagagtgagaggcctggcctctggtcgttttgatttaagctggtgtcctggcccacagaggaacaaaagatactcacagaggacattcagggtgactgggtaactgcggatgccaccatattggtcccttatttcacattgatagggtcctgtttcatttctcgtgacactgggtagaatgaggatcctgttttcaatgggtcgctttaccctgggactgaccgggaggctctgaccatttagccaccaaatgtaggtgtagttctcactcttaggttcacaggtgaagtttaagacatccttattctccctgggttttaagttgttgatggtgatgtagggcttgggcagcttcgctgtgtggataacagagagaagattgtcctgtgtggcacctttgattcctccacaggcatccttcaatcagagttggcatctcccacttctcagcccacccgagtccttgaaagccaatagctggtgcgtgtgtcacaagacagatgcatgatgatctaagggctcaaagactatgaggccagctgctctgtcttagggaagcacagactttctcaagtgtcaattgagcagcagtgttgggtcatggacagacacgtcagtggaagtcacagcccctggtatccctcccagtccctccctaatcagttgactggctggctcaccctgggttccttacctggaatgtgcaactggtgggccccttccaaattccatcctacattgtccccctagatgtgatttctctgcagcttccatttccaaggacattctagagatgagtaatgatgggactacccatggtcctgaaaccctgaagatactgagcagcctggcctgggactggatgtttcagcagaaataacacaggggagaccagaatcaagcctggaggtcagttcagtcatcaggcagtggaggctcaaggtggggcagttttttgcaggtgtttcatgatgacttacttgaaccagtgacctctaaagatagagcagagtgcaaggaatgatctagaaagagtgaaggcgacaggcaagagctggtggctttggagcagaactatgttgcctgtcctgcgttcaagtttcctctccttctgcagagggcaggtgaggaccatgtggatctttccagaaatatatgtggacatttgcaaatgcagcactgactggtagaaagggtgggaaggatctgctggaaatctggtcctcatggaccatgtgtgtttgatggatatgagacaaatttgaagagaagttttgggaatattttctttcactggacattctactctctgattccctggattcgactactctagggacctcatgtaagtggattccagagtgaatatgagaagagactgctggttgccaggagctgggagtggggagaatcagaagttgttcatgggtgtgcagtttcatttatgcaaggtggggaggttctagagatctgctgtagagcttgatgcctatagttcacacaaattgagtatttcttatgcataagacttaggacaaaaagtgttttggatttctgacattttttgattctgaaatatttgtcatatacttactggtttagcatcccaaatctgaaagattcaaaatctaaaatgctccagtgagcatttcttttcagcatcagattagtaggcaaaagtgggaggtgataagccaaagatattcttgccctttttttttctctcaccacttttctagcttggtgattagttttcggtgaattccatactggccatgcctcactcgtatatttttgaaggctttgggatgtgaagcctttgaaggctgattgctattttctatgtcatcagaactttccaccttttcatggttgcctctttttctcagtgtatctgttgtggcagtcattaataagagcctgtcaggtgagatttaggacagtgttttctaattctgcaaaaaatgttactgggattctgttaggtgttacattgaatccgcaactcactttgggaatattatctttctaacaatattgattcctccaatccatgaaaatgaaatgtgtttccatatattgatatcgtctttaacttgtttcagcaatcttttgtagttttcagggtataatcatttgactttttggttaaacttattccaaaatattttattccttttgatgttaatgtgaactgaaattctttccttaatttcctttcggattgttcattgttagtgtatagtctaaagaatgatctagaaagagtgaaggggacaggcaaaagctggtggttttggagcagaaacatattccctgtcctgggtttttgattttccctctccctttgcagagggcaggtggctcttccctgataactagatagacttcactggaaaacatagtgccaatgctccagggatccacttaccagggactatgatcctcttgattatgagatttgttccagcagtggctgagttatggatgaaacagacatagacccctctatatgttttagtgatttgggggataaagaacacttgtgctgattgctggaacttcccatcaatcagccaagaatgctctgccagtgggtgagagtctgtgaggcaggagagcttggggacttcccctgtatggtaataggtgtatgaggaggaaatggtgggggcatccaggccatgtggagcaaagagaataatgtcacaggcgatattttcagagggaagggaaaatctcgtctgtggaagcaccacaatcacagtgaccctgtgagccaagtcacaacattgaagtcccagccaaatcccagctgtgttcactgatctggagcctgagacattcacctgtttctcccatcacaagctgtggacgctgagtctcccatgacaggagcagcctcttttctcctattgttgatcaagcctaggcctactctggtttgcctggggcagaaagtcatggccaggtttgatgtccaggggtaaaggtctctgtacttggacctgagagggactgagaggcctggtctctggccacgtgtatttgggatggcagcctggctcacagaggaacagaaaatactcacggaggagattcagggtgaatgggtcactgcggctggcactcactgggttccgtatttcacattcatagggtcctgcagtgtactttgtgacacccaatagaaagagggtcctgttggtttcagacaactgcaacctgtgagacatagggaggctctgaccattcatccaccacaggtagcttgcgtccggagtctcaggatcacaggttaagctcacagcctccatggcctccctggggtttaatttgctgctggagatggagggcttgggagtctccactgtgcagaaaacagagagaagattgccctgtgtggcacctttgattcctccaaaggcatttttcaatcagagttggcatttcccacctctcagcccacccaagtccttaaaagcccatggcaggtgtgtgtgttgcaagacagatgcagggcaatctgagggctcagaggttgtgaggctgcctgcttcatgtagaaacacagactttctcaagtgtgaattgagcagcagcattgggtcatggaaagacacaggaccagcagtcacagcccctgttgcctctctgagtccctccgtctccaactgcctgcctggcccaccttgtggtcctcacttggagcatgcagtgctggaatcttcttagtttcagtcttactttgccgcccaaggtatgttttctctgcagcttcccttgccaaggacatcctagagatgggtgatggaacttccaattgtctttaaaccctttgggtactggaaagcctggcctgggactgggtacttcagcagaaataacacaggggagaacagagtcaagtccggaggtcagttcagtcatcaggcagtggagccacaaggtggcgcagttttcccaggtgtctcatagtggctgacttgagccagtgacctctaaagatagagcagagtccaaggaatgacctacagagagtgaaggggacaggcaagaactgatagctttggaccaagaccacgttccctgttctggatccatgatgctcccttccccctgtagagggcaggtgaggaccatgtggatctttttggaaatacatgtggatgtttgcaaatgcagaaccgactggtggaaagggcgaacatgaacagatgatggaagtctggccctcatggaccatatgtgtttggtggatattagaccaatatttgggaagaagccttgcagatactttctctcattagacattctactctctgattctgaatttgactactctatgtacctgatatcagtggattccagagtgaatcagagagtagaataggagtttctacgagctgggatcagggcaatagggcgttgttccatggttgtgcagtttcagttatgcaggatgaggaggttctagagatctcctgtacagcctcatgtctatagttcatacagataaagtgctccttatgcagaaggcttaaaacaaagtgttttggatttctaatttttttttgttttggaatatttgcagtacatgtactggtttagcatcccaaatctgaaaaatttaaaatgcacaatgcgccagtgagcacttctttttagcatcacatcagtggtcagaagtgttgagttttggagcatttcagattgtggatttctggatttgggatgctcaatttgtaatactgtaattttcccataaaaagttgtcaggagtttagacctcatgttatgttctgactctagtaacaaaaaatatttggaggaaacattaaaatgttttcatgagtggaaatttttactgatggtccaaacatctaagatcaattgctggtagtagtatttctcttgagaccaacataaggtttaggtgtgccatgaattccagcaggatcacattatgctcaaagaaagatgccaatggtgatttgaaattagcaactccttaagtagagagagtcccgttaaaaggaccgaactgggtagtgtgtcaattacataaagggaggaatgatgccaaattaaaagaagtgatgtgtgttatgttagtaaatatagaaagaactccctgcttctaaattctgtgcagagttaggaaaaatggggaggaccccaaaacaggtatgtgaaatgctttcttcattttctcttaagctcaggaaacaccactagagtttaagtttgtgtgaattaggaagagtctaagtgagatggcaatggctcatgtgtctccccacacgcagaactccaacttatgaaaatggcatcaacatgaggaaacagttgtatgtggcaaaggcagtaaaaccatcagatagcacccacctggccacctccaactggtccccaaaaccaccagtattcccattacatgtatgttacagcctttgtagttgtcccacagctacaaaatttaaaaattgctattgtcaaaacaaaatattaaatatgaagttgaaatgttgttccacttttttaccccactctttttgaactttcctgtttcagttttggaagtttctattgacgtatcctcaagctagggattctttcctcagctgtgtgcagtctaccagtaagcatcaaaagcattcttcatttctctaacagcattttttttttctgagacagagtctcactctgtcaccctggctggagtgcagtggcatgatctcatctcactgcaagctctgcctcctaggttcacgccattctcctgcctcagcctcccaagtagctgggactacaggggcccgccaccatggctggctaattttttgtatttttagtagagacgaggtttcaccatgttagccaggatggtctctatctcctgaccttgtgcccgcctcggcctccgaaagtgctggtattgtaggtgtgagccactgtgcccagccatctctgagggagtttaacgagttgttgacttttgagtttgttcagctttttacttagtgttagaaccgaatgacaaatttcaagcttgttatatgcctgacaggaagccagaagtctctaggaagtgaccagagaatgtgagctccatagcaggttgaggatggagtcatgggcgaaatgagcccatgggctttggggactgcaggcctgtccagcctctgacaccctggtgagtccgtgcaaagattacaacagtgacaggaaactagcatgcctgactccatctggcatctagtctcaggctggctgtcctcactcattgctgggcataggccaggctaaccttgggaggaatttagtttatggtttaaatttgaagcaagaatgataatagttcctccataaaactaacacccttactttgcccagggactgcctttgtaaaactagtgaaagaccatgagattaaggttataggagggaactgaattctgctaaaatgttggcacagtttctataatccctgactgctccgatgtcatttggcaagagtttacaaaagttgtaactaattgctcctatagataacatcactattgtagaacgtgagattggtcttttgagatgtttctcattcttttgcattctggcaaccggctgacctcatccatacctatgactaatggctcagccagtcatgtggtccctacctagagtcagatttaagggcaaacagatcatttccctccgcccacatgattccatcaccaaacaatcagcagtacttattttttagtcctgtgctcctgaaactacccttgaatatctctaacccctgatccactggggaggctgatttgagtaataataaacctctgtcctcctgtttggcagacttggagtcgttaaaatctttcttgactagaaaccaacatttcaataattttttttttttttttttttttttttttttttgtgcaggaggccagaagaacttgcctggcaattatgagtggatggaggaactgcctatccctgtcccattgtcttgtccacaggtcagcctcacaaagggaaagagccctggatgggaatacagtggaagctcattctcttagtgacctggggacattggctcgagatgaagcctggcaggagtggcaactccaggtgatttctgcacctttcctatttcctgggaggtgggccaggccacagtgttagtgggaagggaacagaacagccagcctagtcagagggagtgtctggggaaggcctaggggtgggggaagaagctgtgcaggacagggcttgccagtcagaatgaagtgggaggaagatgagggacacagagaagcagagagaggcagagacaccatggcagtgagcagtgagggagacactgacttcaaaaaccccagggaccaggtgcccccagctccacagtccaggaccaaagagccctgagaaccctccagtggccaaagagcttcagaattacatgagctggggtggctttaggggcaagaggtagtggggggatgaaacatgggtgtcagcctctgaaggacaagggacaggtgtggctagaaactcctaggattctgcatgcaaattcagtctctaaagaggttttggatcattcatttcattccattccttcatttgttatgtgagagctcctgagtgtgtgtctgtctcgctgggcctgtgctggtgtagggtgtgagtggggaaagaaaaggtcctctccttgatcctctcatgacagtgacatggacactttgggaaacacaggatttcaggttcagtgatgggggctaagatctgagggggaggcctggacatgttttttccactgactctgatggttgaggcaggtgatttagttctggagtacagactaatcagttgaccattttctctcactcctctgaggtttggatgcctaagaagagaggttttgagccaataaatgactatggggtgcttggaagccagtgagccctcacttctggtggaggagaggatgagcctgtggctgcggacacacctcatgtgaccctgatctcccctttgtgattgtgtgactctggctcagggactgtgtcttcctgtacctcagttttctgtcaatcagataagctaaatggcaaatggacagtggcttttcatgctatctgtgaataaatgttaaatgattcacagtcacctgacctaatgcttggcacagtggaggtttcacacaaatagcatttattattaatttgcttccatgagaaagcccctttgcgtcagatccctgtgggcaagctgctaccaggtacatcttctctcttgtgtttctgcttctggggacattagactttctatggactggcctaagcctcctaaggcagttgtctgatggcctacaaagcttgtctttctgtcctctccactctgagtgtcaggtgaagaaaactctgtccttgcccagatgaggctctgagggctgagccctggctggtgaacagctccaggagacacagtcctctgacagctggtaaatcctcggtcccagtaagccctgcccaagaagccacaacccagccccagcacaggctcctcagatttatctggagcaaggatttagggacactgttctgggggtgaggcttctagggctgagcttctctgagagtatctcaggggctcctcaggccaagccctactcagttctccagggtctttctcagggtcaaatttatgaagagggcatgaggtgcttgtctgagactgatctcctcctgctgagtccccccatcagactgtccttcctctgcagcgagtgtctgcagggtctggatgcgggaaaggaattctgatctgttgaaatttgtctcctctgtgtgtgtcctgcactaaatgcccaaaccccagcatgggacataatgcagagagggacacaggcaatgtccaggcctgacaatcctgtgtgtgtgaagtagaagtgacccctgtcccccaacacccagggatcatgtggaatcactcacgatataaggtgaaggtgaaatgtccagttactcctctattctcatcacctcccattatgatgtgtaaggtgtaggatcctgcgtcttcctgggtgacattctggatcagcagggatgcattggaatatattgtttctcgtccactgtatgcaggcccatatataattatttgaccgtctactacatatgatgtaatgtaatggtagaggtccctgatttgccctttgtaccagatgtagccagtaagattctggggcaaattgtggacaagtagaagaacatccttcccctcagaaactttggttggctgggcttcaatcgtgacttgggcagtcgtgggtgggttccagaagtttaaaagtgatgctaggaggtggagagagcatcagtcaatattgagagctatgtattggtgtgaaaacatggggccctgggtcctgagaagttctcttcagtcctcagccttgaagacacagacacacacacatacaaacacacgcacacacacacacaaaagcggcatgtgtgtctgtgtgtgtgtatgtgtgtgtgtcctactatcctactaggtcaaggtcagccccatgacccccattccttcaacacttctgaccttggcatttttctgtttgcaatcctcttccccaggggtccgcatggccccctccacactgccctcaggtcctgctcacatcagggcatccttagatttctttcctgacacctccttcagataccctgggtcttccctttctgacctttccctgctctgctccctccagggttcttctcaacacctgaccttacattctagatctctttgcatgtctgtcttcccctccatgacagcgtgagctccatgaggacagggatttttgtgatcttggttgcaccccagtgcccagaacaggctgcagactcctgtagatgtgagagttctcagggccctccacgcccttggtgtttttttttccccccaattgttgaggtttcttgctgaggacagtgtttcatgccctgtgtatatttttatgtgaagtgtcatctgatacagttattattatcatatttcaaaatgtggtggcccctgatgattaatcaggaaaacagaacacaagattttcctacctcttaccaattctggttcctgtgactttcctgttttgacccctgtccctctctggtgtatttccccctatccaggctccaatagagccttctttcctttttctcttttttctctttttttttttttgagatggagtctcatactgtctcccaggctggcgtgcgatggcactatctcagctagctgcaacttctgcctcctgggttcacgtgattcttctgcctcagcctcccgagtagctaggattagaggagcacaccacaatatctggttaaatttttgtatttttagtagagacagggcttcactgtgttggccagactgatcttgaactcctgatctcatgatccacctgcctcagcctcccaaagtgctggcttctttcattttttagtaccccatactctcaaggagaccccatccagtcactctgcttcctcctcctgtcctctcccaggaggttctctcctcacctgtgagcaggagccccttccaggtgatgcgctgtgtgcagggaggggctgagaggagccccatggtctctgctgtctgtgtgttctcctctgtggagatgagcctaggatccagaagcttcctgagcacagctctcagcagtgctgtcctgcctccttctgcgctgagcttcttcccggggcaggagcacctctcaggttcatgggcggggtcaggcccaggacacctctctgtcccctcctctctcagtcctgcctccttgtccctcctgtttttccttttgtctgtgtttcaggtccctgggaattgtggaggcctctgcctttttcagcagtgattctttcaccaaacctcaacacacactttgtgcagacacacacacacacacacacacacacacacacacacacacacacacacacacacacagaaggacacacacagacctacacagtcagaaacataccctgcaggttgggcaagcagagtcctgggcctcagcctcctgctgtccccatggctctgggtcggggtgcacattcatgccctttggcctctttcatccccatctggctctccccttcagtgcaggaggctggagctgcaccaggtccctgtcacagtgacaccccattgtgctgtgggtgagctgtgtgttgcctggtgagagggacccttcctttctctaatcgtgtctagcttggctgcagcttccaaggatggacactcaggacctgggtgtcccagaggaaactgtccttcctggaggtgtgcagggtgaatctctcatgtctcttgggaggagaggcctgtgctggttgctcagtgggggctgtgagtcccatagtcaaagggacagttctcggtcactctgtgactccgtggggtctggccactgagctggagctcagggtttctcatgttcttcctgaccatctttgatgtcctctcttctctgcccagctgattgtcctgtggtcaccacaccttccccgtggtggtgcaggaggaagtggggagtcacccaggaaccccaagggagatggctcgttgagacgcaagagggtgtgcctgggacagagcaggggttcagagctggagagattcatcttgacttactccgtggccatgatgggctcagccctccatgtgccgacatacccaggggtctgtcctgagggttttgacctggccaagctgctgtgtgtagaggaggaacaggcagtggccagagagcctgtctggagggaccttgctcacacctgagggggcgtgtgggggtgagttgtgttctgggagcaaagagcaataacatcccgcttctccctgcaagcgcacaggagaggtctgccttcccaagggacagctggggcaggtggccacatcccggatggtgcctgtgtgtgaccatcacacgcactctgagcaccccgtggtgcagcgggcaggcaggtcatagggtgcctggctgattcccggggaggctgtgggcccttaggcagctgctgttctgtgtcagtgctaggcttggcctgggatgccccagagaacaggatagatggggcaggggcgggcatttagggagcagtgacagaaagagttgatgaggatggagggaggccacgaggggaaagcgcctagtgtggcgtcgcgtgcaccagcgctgccctgggagatgcctttagctgggcccagggaaggagcaggtgtgtggggaggagctccctgcagagggagtggtgttaggttggcggccaccaggtcagggtggagctggcagagtccgtgtggggagcatggagggcgctgaggacttgggccgaagtgaccctggtgagggtggaccctgctgggctgtgggttccgctgagtgaggttggcatcccctgggaaggctccaggctgggagggactctgtccccctctggtggacagggagggaagtgtgaacggcagcaatcccaggccaggctgcatgttttattccacatggatctgcacacttcacacgaggtcacacatatgttatgttacagctccttcaccttccagccccgtgagtcccagtctgtgtggctctatgttcactgttctccctctttcacaatcagatgtcccaaacgcagatttttgtcaccttctgtgagtttgtgtttgtgtgcagtaggcggcactgtgtataccctgggggcagtgatgtctggggctgagcactgcaattgggcttggaagcagaagagggagcagcagggtgggaagatcaatgtcagggggcagggacaagtcattttcattttcttactcccagggaccagaaccctggattctgactccagggcacagtaccacaccctgctggtgtccctggatgtcatgatgctcatagtgtcatgttgtcttggcattcatttttataaggtgtaagtttatttgcctcaaatcagaggcagggcttggtcaccatggcagttttcaatactgtgtctggttcaagtggctccagttggtgtccagagataaaatcttagaggcatctctgctgcttggtgtgctgggtttccctctctccagctgctttctttaaactgataattctgacatttgccctcacatttaaagtgaccacctctcagtcacagcgtgagctcctggtcccagtgtttgctgcttgctttgaacacatccattaaagctccctgctggaaacctgtcagataacaccctggacttaataaagccattggctcaccggtctcttctctcctccctgtctgggctcactgacctctgtgtctgtggtctccaggtttgccgagtgcttcctagtgtctgtaagtagtaaaaatacttacattttcacgttgtggttgtattattgtagcctcacatgccatccagggcctgacattgaggctgccttatgggacctgtgctggttgagcccctgctggagctcttgttttggggcgtctggttctcctggggacaggagcttccagctaacttgattgaaaatctgatgcctttcattgaaacactgggtcagatgatgtattcatgggcttcggctgccataacaaacaccttagcctgggtgaattaaataatagaaatctatttttcacagttctgtgaataatgtgctattgtaaccactttaaaatgctgaatcaaatgaaattaaccacatacacagtgttaaattaccatcaccactatttttcctagaaaatttttatcattttaaactgaaactttgtatcttttaaacaataactccctgtatgttccaccctagaccttgatcttctctactctgtctctatgaatttgcctgttcttgatgtttcatataaatggaattatacaattatgttattttgtttctgacatatttcacttagcataatgtttccaaagtccatgcatgttccagcgggtgtcagagcttcattcctctgtatggcagattaacattctgttgtatgtgtcaccatatttatttatttatgtgttgatgagcacttgaattattttcatttttttcttttttctttttctgtttaatagtgttttttttatcattattattcttatactttaagttttagagtacatgtgcacaatgtgcaggttagttacatatgtatacatgtgccatgctggtgcgctgcacccactaactcatcatctagcattaggtatatctctcaatgctacccctcccccctgcccccaccccacaactgtccccagagtgtgatgttccccttcctgtgtccatgtgttctcattgttcaattcccacttgtgagtgagaatatgcggtgtttggttttttgttcttgcgatagtttactgagaatgatgatttccaatttcatccatgtccctacaaaggacatgaactcatcattttttatggcttcatagtattccatggtgtatgtgccacattttcttaatccattctatcattgttggacatttgggttggttccaagtctttgctattgtgaatagtgctgcagtatacatacgtgtgtatgtgtctttatagcagcgtgatttatagtcctttgggtatatacccagtaatgggatggctgggtcaaatggtatttctagttgcagaatcgccacgttgacttccacaatggttgaactagtttacagtcccaccaacagtgtaaaagtcttcctatttctccacatcctctccagcacctgttgtttcctgactttttaatgattgccattctaagtggcatgagatgatatctcattatggttttgatttgcatttctctgatggccagtgatggtgagcattttttcatgtgttttttggctgcataaatgtcttctgttgagaagtgtctgttcatgtccttcacccactttttgatggggttgtttgtttttttcttgtaaatttgtttgagttcattgtagattctggatattagccctttgtcagatgagtaggttgtgaaaattttctcccattttgtaggttgcctgttcactctgatggtagtttcttttgctgtgcagaagctctttagtttaattagatcccatttgtcaattttggcttttgttgccattgcttttggtgttttagacatgaagtccttgcccatgcctatgtcctgaatggtaatgcctaggttttcttctagggtttttatggttttaggtctaacatttaagtctttaatccatcttgaattgatttttgtataaggtgtaaggaagggatccagtttcagctttctacatatggctagccagttttcccagcaccatttattaaatagggaatcctttccccattgcttgtttttctcaggtttgtcaaagatcagatagttgtagatatgaggtgttatttctgaggggtctgttctattccattgatctatatctctgttttggtaccagtaccatgctgttttggttactgtagccttgtagtatagtttgaagtcaggtagtgtgatgcctccagctttgttcttttggcttaggattgacttggcgatgcaggctcttttttggttccatatgaactttaaagtagttctttccaattctgtgaagaaagtcattggtagcttgatgggtatggcattgaatctgtaaattaccttgggcagtatggccattttcacgatattgattcttcctacccgtgagcatggaatattcttccatttgtttgtatcctcttttatttcatcgagcagtggtttgcagttctccttgaagaggtccttcacatcccttgtaagatggattcctaggtattttattctgtttgaagcaattgtgaatgggagttcactgatgatttggctctctgtttgtctgttgttggtgtataagaatgcttgtggtttttgtagattgattttgtatcctgagactgctgaagttgcttatcagcttaaggagattttgggctgagacaatggggttttctagatatacaatcccatcgtctgcaaacagggacaatttgacttcctcttttcctaattggataccctttatttccttctcctgcctaattgccctggccagaacttccaacactatgttgaataggagtggtgagagagggcatccctgtcttgtgccagttttcaaagggaatgcttccagtttttgcccattcagtatgatattggctgtgggtttgtcatagatagctcttattattttgagatatgtcccatcaatacctaatttatggagagtttttagcatgaagcattgttgaattttgtcaaaggccttttctgcatctattgagataatcatgtggttcttgtctttggttctgtttatatgctggattgcatttattgatttgcgtgtattgaaccagccttgcatcccagggatgaagcccacttgatcatggtggataagctttttgatgtgctgctggatttggtttgccagtattttattgaggatttttgcaccaaagttgatcaaggatattggtctgaaattctcttttttggttgtgtctctgcctggctttggtatcaggatgatgctggcctcatgaaatgagttagggaggattccctctttttctattgattggaatagtttcagaaagaatggtaccagttcctgcttgtacgtgtggtaaaattcggctgtgaatccatctggtcctggactctttttgtttggtaagcaattgattattgccacaatttcagatcctgttattggtctattcagagattcaacttcttcctggttcagtcttcggagggtgtatgtgtcgaggaatttatccatttcttctagattttctagtttatttgcatagatgtgcttgtagtattctctgatggtagtctttatttctatggaatcgctggtgataacccctttatcattttttattgcgtctatttgattcttctctcttttcttctttattagtcttgctagcagtctatcaattttgttgatcctttcaaaaaaccagctcctggattcattaattttttgaagggttttttgtgtctctatttccttcagttctgctctgattttagttatttcttgccttctgctagcttttgaatgtgtttgctcttgcttttctagttcttttaattgtgaagttagggtgtcaattttggatctttcctgctttctcttgtggggatttcgtgctataaatttccctgtacacactgctttgaatgcatcccagagattctggtatggtgtgtttttgttctcgttggtttcaaagaacatctttatttctgccttcatttcgttatgtacccagtagtcattcaggagcaggttgttcagtttccatgtagttgagcggttttgagtgagattcttaatcctgagttctagtttgattgcactgtggtctgagagatagtttgttacaatttctcttcttttacatttgctgaggagagctttacttccaagtatgtggtcaattttggaataggtgtggtgtggtgctgaaaaaaatgtatatcctgttgatttggggtagagagttctgtagatgtctattaggtccacttggtgcagagctgagttcaattcctgggtatccttgttgactttctgtcttgttgatctgtctaatgttgacagtggggtgtaaagtctcccattattaatgtgtgggagtctaagtctctttgtaagtcacacaggacttgctttatgaatctgggtgctcctgtatttggtccatatatatttaggatagttaggtcttcttgtgaattgatccctttaccattatgtaatggccttctttgtctcttttgatctttgttggtttaaagtctgtttcctcagagactaggattgcaacccctgcctttttttgttttccatttgcttggtagatcttcctccatccctttattttgaacctatgtgtgtctctgcatgtgagatgggtttcctgaatacagcacactgatgggtcttgactctttatccaatttgccagtctgtgtcttttaattggagcatttagtccatttacatttaaagttaatattgttatgtgtgaatttgatcctgtcattatgatgttagctggttcttttgcttgttagttgatgcagtttcttcctagtctcgatggtccttacattttggcatgattttgcagtgtctggtaccagttgttcctttccatgtttagtgcttccttcaggaggtcttttagggcaggcctggtggtgacaaaatctctcagcatttgcttgtctgtgaagtattttatttctccttcacttatgaagcttagtttggctggatatgaaattctgggttgaaaattcttttctttaagaatgttgaatattggcccccactctcttctggcttgtagagtttctgccaagagatcagctgttagtctgatgggcttccctttgagggtaacccgacctttctctctggctgcccttaacattttttccttcatttcaactttggtgaatctgacaattatgtgtcttggagttgctcttctcgaggagtatctttgtggcgttctctgtatttcctgaatctgaactttggcctgccttgctagattggggaagttctcctggataatatcctgcagagtgttttccaacttggttccattctccccgtcactttcatgtacaccaatcagatgtagatttggtcttttcacatagtctcatatttcttggaggctttgttcatttctttttattcttttttctctaaacttccattctcgcttcatttcattcatttcatcttccatcactgatactctttcttccagttgatcgcatcggctcctgaggcttctgcattcttcacgtagttctcgagccttggttttcagttccattagctcctttaagcacttctctgtattggttattctaattatacattcttctaaatttttttcaaagttttcaacttctttgcctttggtttgaatgtcctcccatagcttggagtaatttgattgtctgaagccttcttctctcagctcgtcaaagtcgttctccgtccagctttgttccgtttctggtgaggaactgcgttcctttggaggaggagaggcactctgctttttagagtttgcattttttctgctgtgttttttccccatctttgtggttttatctacttttggtctttgatgatggtgatgtacagatgggtttttggtttggatgtcctttctgtttgttagttttccttctaacagacaggaccctcagctgcaggtctgttggagtacccggccgtgtgaagtgtcagtcttcccctgctggggtgtgcctcccaattaggctgctcgggggtcaggggtcagggacccacttgaggaggcagtctggcagttctcagatctccagctgtgtgctgggagaaccactgctctcttcaaagctgtcagacagagacatttaagtctgcagaggttactgctgtctttttgtttgtctgtgccctacccccagaggtggagcctacagaggcaggcaggcctccttgtgctgtggtgggctccacccagttcgagcttcccagctgctttgtttacctaagtaagcctgggcaatggcgggcgcccctcccccagctgtgctggtgccttgcagtttgatctcagactgctgtgctggcaatcagccagactccgtgggcgtaggaccctctgagagaggtgcgggatataatctggtgtgtcgttttttaagcccattggaaaagcgcagtgttcaggtgggagtgacctgattttccacgtgccatctgtcacccctttctttgactaggaaagggaactccctgaccccttgcacttcccgagtgaggcaatgcctcgccctgcttcggtttgcgcacgttgcgcccacccactgacctgcgcccactgtctggcactccctagtgagatgaacccggttcctcagatggaaatgcagaaatcacccgtcttctgcatcactcacgctgggagctgtagactggagctgttcctgttcggccatcttggctcctactccttattttcgtattttatcttttgtgaataatgctgcaatcaacatttccatgtaagtacctgtttgagtccctggattaaattctttgggcctatacccaggaatggatgttgtttcaaatgagaattctgtgattagctttttgaggaacagcaaaactgtttctcctagtggctgtacctttttatattctcaccagcaatgtatgaggattccaaattctacataatgctgctacttgttatttaacattttaaaagaattgtagccagttttgtaggtgtggtgtggtgtcccattgcagctttgactttgtattttcctaatgactaatgatgttgagtatcttttcatgtccttcttgactatttctataccttctttgaagaaatgtctatttgagtcttttgcccatttataaactggatggtttgtccttttgttattgagttgtagctagttcttgatattatttggacatgaaaactgcgtatatgtggtttgcaaatattttctctcattctatgtctattaattattgtcttaataatttcctttgatgcacaaaatgctcacatcttgataaagccctatttatcttgtttttcttgtttctcatgcttttgtatcatatctaagaatccattgcacatttgaggtcatcaatatttacctctatgtctattttgagatgtttttattgttataggtcttatatttaactcactgatgaattttttagagaatggtttgatatggtgggaggtagagttatctaaattcactgttttgcatgtggttatctagttgtttctgcactatcattggaaaggagaattgttcctccattaaattgtcttgacaccctcttcaaagagtaattcaccataagtgtgagggtttatttctagactctcaattctatcccatttgtctttatgtctattcttttgccagcagcttacgtctattctttggcagcagcttctgttttaataagtgtactcctttgtgagatttcaaataagaaagttcaagtcctacaatttattttggcaagattgttttggctattcaggggtccttttgtgaaaggtggggaggccaatgtttcacaattgggaaagccttttctgtcttcttcatggggaagtttgggagaatcttttaagaaacttaatctaagcaggtaaactgtcaccattttatttgctgaagtgctatgttaaagtgtgcattgcctcttgtggaagaattgtgagaccctggaagctcttgctcacatggtgagagatagtgaattccatgatgaggggcagagaggacagtgttttgggatacaatgttgttgggggagttgtatacatctcaacttctttatgtctctgtacagtgggtgtagggaccagccacacagggtcggtgggtttttctccccgtgtgcagagatgagagattgtagaaataaagacacaagacaaagagacaaaagaaaagacaaatgggcctgggggaccactaccaccaagatgcggagaccggtagtggccccgaatgctaggctgcactgatatttattggatacaagacaaagtgtcaggataaggagtgtgagccatctccaatgataggtaaggccacatgtgtcacatgtccactggacaggggacccttccctgcctggcaggcaaggcagagagagagaggagaaagagagagagcttacagcattatttctgcttattagagacttttagtactttcactaatttgctattgctaagtaaagggcagagcctggtgtactggatggaacatgaagggggagtaggagcgtgtccactgaagcacaacatcacagggaggcagtcaggcctttggataactgtgggtggacctgactaatgtcaggccctccacaagaagtggaggagtagagtcttctctaaactcccccggggaaagggcgactccctttcctggtctgctaagtagtgggtgtttttccttgacaccgaggctaccactagaccacggtccgcttggcaatgggcatcttcccagacgctggcattaccgctagacgaaggagccctctagtggccctgtctgggcataacagaaggcttgcactcttgtcttctggtcacttctgactatgtctccccagctcctatctctgtatcgtctggcttttcctagggtatgattatagaccaaggatttttataatattggaataaagagtaattgctaccaactaatgattaatgatattcacatataatcatatctaagatctatatctggtataactattcttcttttatattttattatactggaatggctcgtgccctcagtcttttgcctcagcacctgggtggcttgccgcccacaagtgggcatctccattggacacagtaggttttgaaatccttgtttatcctctggggtctaggtcttggcttgcctgttagctgcagctgaaagaggtgtctgctaaggcaatgacacctgtggggagaagaaaggttcagcagagtgaaagtagctgaggctcagagaggccaggaaagtctgactcttagaaaccgtgggtcagcagatgggtgtcctcacgggtacatgggcgatgccggtagccactgcagtggactggaagaaggtaagtgatgctgggtatcccatgttctctctcagctctgcagctgaagatttgggccttgggctggtacggccctgcagcaggggaagggtacacaggaatggctgcatatcgggacgaagtccatgtcatcttcttaggcattgttactgcagatggaggattctgttcagagacctggcctggacacatgggagggcccaccccattcttttaaaattattttaagagaacagtattagcaaatgtggtacatgtcttattctgctagaatcagtcttattgtcacgttttacaaagtatcttttaggaaatggtgagagccatccacactatgtggatttaaaggggactctagtataatttcagctttcctactctttatagaaaccatcttctctgcaaacacacaggcaatatctctgtgttcatttctattgggagccctgtatgcaaggtggagagtgccacatttccctctgagatgttatgtaaaagtttgaggtggagatgacatatctgacactctgttgttacactcagaagctactacatgtgaaattctaatgactgcattatcctgccaaataaaaggcaggcatgagcaaggacagtaaagaggggtgagagcctcatcatgatggggagtcttgttctgacatcttgggaaaaactgtccacagtgtgaagtcatcaacttcttgtcctggtttacaatttgagtggctgttgttatggtgtcaaacattttagtgagttctgagtggctcacgcttcaggtacaagggttttcccatgaaatttacattgagttgtccacctccagcttatagggcttctggaacagaatgggtcttgctcttagtgattccatgggagaaaatggaattggaggaactagtagaattcagggtaatgttcagtttacaggtggataataaaaacacagaaacaatgaacagagctgcaatctcataaccggtgtactacagtttttattttccacgtaatttttgtctctacgggcatctctagttttaccaatgataatttcagtagaataagtttgtttgcaaaataggttgagtttcttcaaacgtggtctgattctttacataagtgcagcaagagtagcaatggaccatgtagggtctcttttaaaattttctttcctctaagtttttataaggaatctgagattaaacttttacaaacctcttgagaataggaagccaaaccaaggctgacttcagactttgcctgcagttcatattggttcattctatgtatattcttaaatataacatcccagtcaaagccttggtaatataaccaatgatttgaaatgtgtcctgttacaaagagagcagattgttactgtacttgtgcaaatatgtgtattaccataaacatatcaattctcatgaatagttgcccaattctggggcagtcaggtagagagcaaaagtaaatatttcaataattgttcccagaagtatagtttattgaactgctataagctatagatagattaaaagaaaaaaattccataaatgtagaatacaaaccatttaaagaatcagcaaattttcaaataaaaatcataaaaacattatcctcattattatcaatatttcaatgaagtcaatgtttttcctgcttggtaggctgagagttttatgaagatatcagcctgttagttaaagtttttggaagttcttagacagtcctgtgggataatgtgaaagttatcggaaacttgtattaaagagtacttgtcagcatcttttctacaaatctccttgaaaaggaagcaattttggactgtagctgattggaaatgctttgaagaagaataaaaacaatgtctgttagtgggaaagattttaaatgactatggttaaaactctgatgagaattcattgataacacagctcacataaaaagttagttacttctgtagtatatgacattgtggctgataacatacttaatttctaggaatctcatacaatttctggaacaatcatatcagtaacatatccataaatataacatagagaaggtttagcatcctttaccatttatgatttgaaaatgcttttcatataattttacatatcaaataaagtggcttttccatgtagcttgtgtttctcaacaggattactgagttcttggtggaggctgttaatgaattgggccaagaaagtataggcttatgtatgctgaaaaatttccctagataattccaatactcccagctaataatcatgaatttaggtctaaattttacctattagaacagctgttatttatcctggttacacattagtagcatctgggaagacttaaaaattaccaatgcctgagtctcactttagaccattaaattggatcctatgggtggggcttgggcatccatttaaaaaaatgttttctggtgattccaatgtgtagctgtatttcccctcagatttctctgatttcttttggcattcacttttttctattttggtattataattattttttgggtcttatcatctatcttaggctttatgttccttggggtagaaaccttgccttcttcatttttgtatctttcacgaacatatgagttggtcatcaggaaaatgttctcaatcacaagtaggttgtgttctgagtctcaggtttacacattaatgcttgagtcattgttctctgggaggtgagaggttgcttgtgatgaagggtatgggtaagcccatactgcagatggtagatgggagatcaccctgttttcagccatagcattggaactaagcattctatgtgtatatcaggtggaggggaagggatgtgtagaaagacagatttaattagaatggaggaattatactagggaatagaagtatttaaagcaacaaaaattagtaaagagaagaaatgtgaacttatcaaataggcaagagtagatccctgaagatttttgaataggtgagttaactagaatttaggaagctaataagacagtcatacacaaggaagatttcaaagactggagataagtcaagcagtacctctagcagttgttgaggttgtgggaatggagagaatgacaaaagtgagaaatgttataaaaaaggatcaagagggttttataaggtattgaatctgggaaacaaatgagcagagactgaggataatcacttgtaggagacagtggggtacagggagcatgaagaacaggggagaagagacctgcaggaataaatgctgagaagcaggagtttagtgggaggaggaggagatccagtcccaaataccggcaaagaagtcctttccctctcccaagcaaggcagtcagccctgcaggaaacaggacaaaaggaaaagccatcatacctgccagtcttcctgaaataaactacaacagggctgctagatcagcgccacactggccagtacttcaatcatgatgctgccagtggctctacctgaaaggccaggagaacttcctttcactgaagtatctgtcatggaaagaaaagaagagaaggaataaaggtgatgttattttacagcgtggtaccttaggaaccatcactaagtatttagtagtttctactttttccttcggggattacattaattttgtgggacggttgctggtagatgattagccaactatattcttgcagtttttttctctctcaacgtgtttctaggttagtgatcagtcttctgtcaatttcatcctgaccatgctgcactcagatattttcgaaagctttatgatgtgagaaaggctgactgctattttctgtcactagaactttgtaccctttcatggttgcatctttttctcagtgtgtcagttgtggtaggcatgaataagactctgtcaggtctccatggcagcttgtgtttctcaagaggattactgagtccttggtggagcccattaatgaatagggccgagaaagtataggcttatgtatgttgaaaaatttccctaggtaattctagcactctcagctaataattgattaattaataatcaactgacttgattgacagaaggcccagatcagtgcattccaaactgacaacctactttgcatagagtcctcactttcctgaagctctcagcagggatatgaaagcaagcccagttctatgagactctgttttattctcctgggtgacttgtgggaagaccccctatcagtcttcccatgctctctttgaactgtagctaaatctttgtctttctccttcacaggaatgagatttgcatagtggtcccaaagttccccagacttttttcatgcctgccccactttccctcccaggcatttttcctaatacattatcctgcatgtctaatctcatctcggatgcatctcagtgggcataaactaacataccaggcttgatttttttgcacttagcttttttctgtctctcccacatgtagccagtaaccatgtcctagtgtttcatgtgttacccttttttcatgtgtataggaaaaaaatatatatttccatatacttatttatatgtaatatatataataaaatgtgtaatataaaatgtataataatgtaaaacatatacatattttccatatatgtatatggaaaaagaggtaacacataaaacaccaggacatttacatataataaaattgacatatgttatatatgtatgtagtgtctggtagtcttaccctctttataaatacacactttttgtcactgccccttccttccttcccatgcagagctcctatggccaaatctccctacttctccaagtttgtgtcactcactgtcctctgtgttgtgtcccatgtgctgtgtccacagcctcctagtgttttatgtgttctctttttctatatatatgtggaaaaagcatatacatatttctctgtatatatttatatacaatatataattatctaaaaatatagaatatataacaatttaaaatatatgcatatttccatatctatgaaaaaaggtaacacataaacactaggccatttatatataaaattcacatatgtaatataaatgccaattttatcatatataaataagtatatccatatagacttatcatatataaggtgaatttggaatgccctgacctgggccctctgtcagtcaagtccctgccatggaggccattcatggctgccacaactgagacactgggagaaagatgcaactatgaaaaggtgaaaagttctaaagtcatagaaaatagcaatcagcctttctcacatcccaaaaccttcaaaaatatctgagtgcagcatgtccaagatggaattaaaaacttcaatcttgaaaaggaaaaaggaagctggaggattcacactttcagatttcagcatctactgcaaagctacagtaatcaatacagtgtggtactggcataaaggaggacatagaaatgaatgacatagaatagagaacccagaaagaaagcttgcatatatggccaaatgatttgtgtcaagagtgtcaagcccattccttggggaaaggacagtctttttaacaagtgatactgggaaagctggctatccatggacaagtatgagttgaacctttacctcacaccatatacaaaaaaatgaacccacaatggatcaaagacctaaatggaagagtgaagactaccagactcttagaagaaaacataaggaaaaagcttcatgatattgaatttcagaatgatttatttgttataactacaaaagcataggcaacaaaaaagggataaattggacttcatgaaaattaaaaacttttatatatcaaaggccattatcaagaatgtaaaaaggcaagctatgacatagggaaaatatctgcaaatcatatatctaataagggattaatttccagaatacatgaagaacactacaaatcaaaaacagcaaaaacagaaaagcccaattaaaaaatggacaaaagactgaaagagggattttattaaagaagatatacaaatggccaatgaggacatgcaaggattctcaatataactaatatttagagatttgcaaagcaaaaccacggtgatacatgacctcgcacacattaggatggctttgataaaaacaacatgaacaacaacatcacaaaacaagtgttttcaagtacgtggaaaaattgaagctctttgtgtgttgccgatgggaatgggaagtgttatagccactgtggaaaaaatggcatggcacggccggctcatgcctgtaatcccagcactttaggagccgagatgggtggatctcttgaggtcaggagtttgagaacagcccggcaagtgtggtgaaaccccatctctactaaaaatacaaaaattagctgggtatggtggcatgcgcctgtaatcccagctactcaggacgctgaggcatgagaatcacttgaaccttggaggtggaggttgcagtgagccaagattgcaccattgcactccagtctgggtgacagagcaagaccctgtctcaacatcaacaacagaaaagaaaatggtatgtcagtttcttaaaaaaaattaaagcattaccacttgaaccagcaattctacttctggacatacagccaaaagtattgaaaaatatttgaacagatatttgtacactgatgtttacagcagcatcactcacaatagccaatgggtggaaacaactgaaaagtctattgaaagataagtggatgaacaaaaaggtatatccatactttggaatgttcttcaatcttagcaagggataaaattttgacacatggtgcaaaatggatgaaccttgaagacattatgcgaagtgaaataagccagacacaaaaggataattattatatacttccatttatgtaagatagttagaatagtcagttacttagagacagaaattagaatggtgattaccaggggttaaggggagaaggaatgagagttatcatttattgggttcagaggtttagtatagtaggataaaaaaagctctggaaatagatagtgttgatagtaacacaacactaaattgcacgcttagaaacagttaatagtaagtcttagatgtatagtgtctggtactcttaccctctctgtaaatgcacactttttgtcgctgttcctcccctgccatagagagcttctgtgagttaatctccctatttctccaagtgtccatcactcactgtcctctgtgttgtgttccaggagctctgtccacagactcagacaggcagtgacttcagagccaggacacagccctattcccattttttaaagccttacccatgggaggcttggcttctactggcagctcgatttagccagattcagaaccggccacccaggcaccttatccacatgccctggccccagcccaggtggagtcagggcagggtcagtcactgggcgagcccacagcaatgcagggagcagagtctgagctgcttctccctcaccaaggggcttcctcctctcattggagaaaagtgtgggcttgttttgaagcctctgatgttcatcgcagctcatggagtacacacacacacagacacacacacaaaggagacagaagggatgttttggtgacagaaacagcttgaccatgaggaccctcctctttctccctctgtgaaggcccttacactgcatagtgcttggggctgataaagccatttccctacatttctcaggctggacccaaggtcatccaccagaaatctggcaaacaaagggaagagaatctgtagatatgaattgggagtgttcaggagaaaaatttgggatttacttttgtgcatgggacacaggctgagaataaaaatgttttcctggctctttcttggaaagccagataggcttcacctgaaagcatattgccaatgctccagcgatccacttaccagggactctgattttcttggttgcgaagtttttgccattagtgactgggttatggacataacacagatagtccccactattctcagtagtgacttgggggataaagagctcttgtcctatttgctggttattcccattcagcagccaagaatactctgctgatgggttagagcccatgaggcaggagaggttgaggtttgaccctggatagtaataggtgtctgaagaataagttgtgggttcatctgggccatctggagcaaagagaataatgccacaggtaatgttatcagagggaatgggaagctcctggtctgtgaaaggggcacagtgttcctttttgccaagtcacaaccccgaagtcccagccaaacttcctctgtgttcactgaactggagtagtctaagaaattcacgtgttctcccatcacaagctgtggaaccagagtctcctaagaccagagaagcccctcccctcctgggcctacccaggtttttctggggcaggaagtcatggccagcttgggggtccaggggtaagtgtcttcatacttgaacctgagagggactgagaggcctggcctcatgttatgtggatttgggccggcagccttgtccatgaaggaaaagaggatactcacagagaacatccaggtgactgggtcaatttggctggtactcactacattcttcctttgacattcatagagtcctgtgtcactccttgtgatactgagtagagcaaggatcctgttgtcattggacatctttagcctgggactgagtgtgagtctatgaccatttacccaccacatgtagattgtgccatgaatgtcaggttcacaggttaagaccacagcctcctcatcctctgtggggttgctggtgacatagggcttgggaacattcgctgtgcagataacagagaagattcccctgtgtggcaccactgatttctccatgagcattttccaatcagagttgacatctcccacctctcagcaaatctaagtccttaaaagcccacagcaggtctgtgtgtcaaaagacagatggatgcatgatgatctgagggctcagaggccatggggccacctgctctgtgtgggagatgcacagacttctgaagtgtggattgagcagcaatattggtgaagtgtgaattgagcagggtcaaacaattagagtttgattaactttgtttaaattgagcagagcccaagtgaggcagcagtggctcatgcatctccccaaccgaagcaccccaccttatgacaatgtggttattatgaatacacaggtgtgaatgaaacaggcagtaaatcagacagcacccacctggccagctccacctggtcctaggaaccaccattattcccattatgtgtatgttacagctttttaggctacaaaatataaaatacaatcacagaatataaaatatgctattgtcaatacaaaatattgaatatgaagctgaatatgttgttccactttttctcactcttgttaagctttgctgattcagttttggaagtttctattgacacacacttaagctagagattctttcctcagctgtgtgcagcctaccagtaagcccatggagggcattctttatttctcttaaagtatttttaatctctagcatttcttttgcttctttcttagaatagccatctctgtttaaatcacccatctattcctgaaaggtgtctcctttttccatcataatccttaaccagagttgttttaaatttccagtctgataatttcaacatccctaccacatctgtgtctggttccaatccttgctctgtctttcaaactgcattttttttttttttttgccatagtctgtcttgtatttttttgaaaaccacacatgatgtactgggtaaaagggacttgagtgggtgggcattcagtgacacggtggtgagtgttgggagggaagggttctgtggttctggatgagatctgtgtcctgggctgtgaatgtcacaagtgcctctcaggtttttctttccattaggtgggatatgatgacttgaggaggctggagttggatacttcccctccccctggccagttaagctcccatcaaaccccagctaattaggctgcagtaaaatagtttctcttaaatttaggtcttaccaagaagaatataattcactgacaactttccaagtgtttttttcccttcttcctagaagaaggatgtggattctttttggatattgactgtgagaaactggtagagctccaggagctaagagtcataaatctgtccccctactcccaagactaatccatccactggtgtgtttatctctgcactgtgtccacactgagcctccagaatttcctcaattagagttcaggttttctgaccccagcacttgttcccgctgaggtttctgtgcctgtgtttctgctcaggtacggtgcgctgctctgtatttgcctgtgggtctctccaatatgtgggccagttagcactgagaccttgcttccagagaaatctaaatgagttgttgatttttcagtttgttcagctttttacttgttgttagaactgagtgaaaatttttaagctacttacatgcctgacggaaattcgaagtgtctagggcatgactggaggatatgagccccacagcaggttgaggatggagtcatgagtgaaatgggtgaaatgagcccatgggctttggaaactgcagatctgtccttctgcctctgaccccctggtgagtccatgaagaaagtgaaaccacctttgcgaagcataagatggtgagaggaagctagcttggctgaccgcatctcacctctagtctcaaactggccctcttctctgattcctggacataggccagggtaagcatgggaggaatttatagtttaactttgaagcaaggatgataatagtccctccctaaaattagctcctccttgtcgggggctaccttggtaaatctaagaaaagaccacgaattatgggaggggcccaaattctgctaaaatgcaggcatagtttctataatcccttacttctcaggagtcatgtatccagaggtcacaagatttgtgactttcctagttgctcctatagatagcaagactactgtagaatctgagatttatcttttgagatgtttcagacttttgcattctggcaaccagctgacctcatctagactcatgaccaatggctaaaccagtcatgtggcccccactcagaggcagattcaacaaatacataccattttgcctacgtgcatcatttcatctccagccggtcaacagtacttattccttagacctttgccccttcaaagtttttgaaaaactctaacctcagagccattggggaaggtgatttgagtcataataaatttctgtcctcctttttggcagccttgggctaagcaaaaccattctttactacacatcaccttcacaataaattggctttgcctgtgcagagggcaagaacctgtcaggtgattgtaagaatggatggaggagtcactgatctctttcaggtggcctgtttcatgagtcagcctctcagagggaaagagccctggactgggacacagtggaagctcattctcctggtgacccggggacattgcctcattatggatcctggcaggggtggctactctggctgattttggtgcatttttcatttcccagaaggcaggacaggcctcagtgtgagcaggaaggaaatggaaccgtcaatcttgttagagagggtgtctgggtaagtcctcagggtggaggaagctgtgcaggacagggctcatcaggtagaatgaaagggggatgcacttttttcactgaacacctttcagatgtctcaccaactctggcctcactgggctctgcctttccttctgagcccagagccccgagccctgattcctgggagggaggaagagagagaggaagggtgaagctgggatgtgtgctgtccaggtttcttccatctctggaatcttgaaagcgagggaccctagtgtgttaccacagaggagaccatgggaaaaagctgtttctcaggggtgcctggcttatgaattgaggggaattcagaccaggttggactcgtgaactgcagggactctgttccatgtcagcaaccagctcctctagctcagtgtttctctctgtggctaattcttttgtgtgatttctgagcccatgctagagtcctcctcacgatgcctgatggtcagacctgtgtggggagacctaatgatggggtgggggtggtcttgagtgtcacacagagtgtccagggaacaggctttgtgactttctctaccccagccccacaacaagatctggatagtgggcttggtcagataaagtcagaatccatggagggagggtatgtgtcctggcagtactgaggttcctgcctccaggttagttctcagtctctgcaaatacatttatgttgtgcatgtgctgtttcctggactgtttcatgtccctaacttcttgaacctgtctgcagataatgtcatgagaggtctgcatggaagtatatgagggctctctgattaggatgggtgtgttttacatagtgggtttttttttttcaccaaattgtggttgagtgtgtatatagaaacacatacatacttatattcattagatttgactatttatataaatttaatatacagatacatttctataaatatacacatatatgtatatgtgtatatatgtatatgtatatatgtatatgtatatatatgtatatgggtatatatatgtgtgtgtgtgtgtgtgtgtgtatatataaaatgtgccattttaaccacttaaggggagagagagagagaagagagtttctgctaataccaaatctgggttaaataagggtggtcctatttcctggggttgggcttttgctagatgtgtcagttcctgttggaagtgaggtagagaggttacatgcttaaccaatgtagagattttctatatgaaaataatctgtgagcacactgataagttttatccttttctaggtgaaaagcttggtgaaagattttaaggacttcccattggctgaaggctggcaaatggagtttgctatcctctgactgcagccattctgaggactggaaagaataccctgagaaggggcctattttatttctgcaggaaggtactgaggtttaatttatcttatggagtcttcctagattagaaggctttgaggtgtgttgatgccttgccagtgacttagctgcctgatcagtgaacctatttcctttggctacatcatctgttccccttttgatgttccctataatgtatcactgctatttctcatggaagaaaactgaggataataacctgttaattttttggtgatattttacaggaaatccattagtggtaagaaaatgccttttattttaaatggcagcatgagcatgaagaactcaaaaagcatacttggaatcagtgtaaatgttagctacctttcccttgcttaatttaagtgctcttgtaagaaccatttgtttagctgattgagcacctgcacctgaagggagatgttatttagagtgactactgcttatcctgccatatatatttcttgctttaccagctgtttgttagctaagagctccctctagaggaaagtaattttgccacattaagtggggatgtaaaccgttctttcctagggttaatttggaggcttttctgactagtagagctattgtgacagtggtttggaagcagatgtaaacaataggtcctcctaatggcaaataagaggttgagaaaaatattggattagaatttttcctgagacaccccttatggttgtgctatgggaagaggggaggcctggataagaaaggagaaaagagagagactagatctagtgtttagaaggaggtctactttcctccctataatttccagaatgacctgtgtctcctgtgctgtaatggcagtttgagctgctggagccaggggtttgagccccaggacccatcagtcttgctggaccactgtgagactggtactgaacccagtgacctccaactctgggagcagttgcatctccagtggtctccaccacaggctggtcattgtcaaggtggcttcctcttgctgtttggacactccttcctaaaaatgccctggcttgccacaccgagagcaactagtggatacacctctgggatcctggactttgcaactctgcaaagtagctattagaggctttgtccttctcttgagctttctctctttcttctgggccttctcctggtccctattataaaagactgaagtggctaccctcagaaggttttccaaggtgctatgtgctactatagcttgccttttgtaggttccttctaatattgggagcattctgtataataaacttatctttttgaatgggctgtcacttgagtgaatcaggagataaaaaggtgtgtgctaatagtgcccctcttaacctatccataaaggctgcaggattctcctctggctttgagtctatcatagacagtttagaggaattaagaggtctggccttagtttttcttttccattcatctgctgagctattggggcttcaatcagggttgccaagaggtactgcttcacttcttatttggaatggtgtttctgctatttcttcactttctgtatctccttccttcccttttggtgtattataggagatatgttgctcatcttcaaaattctctggtgcttgtagagctggctgtttttcagttacagttagggtttggtttaggagcagcataacatccttccatgtgaggtgaaacacctgacttaaattctggaaagcttctatatacctatcaggattgtctgaaaatcagcctaagtcttactttatttgcctaaggtcctgtaatgagaagggaacttggagggaccccaaattatggggattcttctcagatggttccctgggaagttgcttttctaattctaggggattattctttataggccttcctgatatggctgttaaaaaaatctgggttgctgttacaatgcttctaaagttttagtaaaaatgccctgtcattgtgcaaaatagaatgagttgcttttctcttcaaagtcctgaggttaaaagagttctagtgcctcagagtgcactccagaggggtgcaaactgaagatgctctgttagccatcgagaaaaagaagtgagaataaaagtgtccttatagtcccccttctttcattgttacccagagtcatgtggaagacagtgggagcatccccccaactgttttctctccttggttcctgagtcctggcactgtgttaaatttgccacccatggttgtaggtgtggccctctaagccatggaactggataaatgaagtgatgacattagccacactttacccatgcagccttagcttatctgcctgtgatctgcctggcctcctgaaaaatggatctctggtgaaattgtaatagttgcctttgagcaagctttctttaagagagggaatgtgccagttgccagttatggcccatgctaaaacacttaccctcagaaaagtggtcctggttgactctgttcttaaaatgtccttactaattaaatactgttctaattggagatagaataagtaccttaaatgaacgtagggacctaatggcagtttttcctgctgatgggacagtatcggaactaaaatttggctatggaagacattttactcctaactgttgaaagcagagctttcccattcacagaaagggcttttctatcagtgcaaaaagagagaattggaaaagtgcagtgttatggcaaaggaccaacaatgtgcctcataaggaggatttatgtttccactaggtgacactgttggcttagaaataccaagtgcttaccaaaggaaggagagagagagagaaagagagagggagggacctattgggttagttattataccatgtaccgatctttcctaacagaactgtttccctgaaccgtaaaaatttccacatattgcaaacacaaaaagaacaggagacatagagaccatggatagaaaggaagaacaaatttgcaacaggatagcaaattaggagacccattaccaacatctggatgagctgccggaagctgtgttcagtccagaagcctttgaataacatcagggtgtttcctggccagaaattctcagctgctccatgacatcccccagcgtcatgtgatggtgaggttctccatgaaaggaaactagtttgaagagaaccttgaaattaaaggacagatttgaggtttgctccatactcaccattctgatgtttctatcttctgttctgatcacaatcccagatgagaactcccaaataaaatggctctgtttgggaatctattcatggttctttgtcacacactgagaaagaattcgggacatggaaacacgtgaggagtgggtttaggagtgaaaaatttaacagacaataaagaagagagagagaaaaagctttctcatactgagaaagcagtcacccgagagagggtctccaatttgtggtggaatgcaattgattttgtacagagacttgaggaggcagtgattgatttacatagggtccagggtattgttttgaccaggtgtgctgtttacgtagcccgagaaaagactggccctcccaccttaatcttttattatgccattgtggcttctacctggtggtcatcatgacacctgcacatatggtgacaaggaaaaaagtgcaggaactgccatattgggagtacctggctcttagttgcctgcatctgtatatgcttatctatgcttgcagcctgatcattcagtctgttttctgttagaaatggtttgggggctgcgttttattaaaggaaaattccaccaagaattcttttaccctttctagctgcctaaaaataatttctcaataactcctgtattaggacccctttaggaaaacagaaaagaagacacagactctcctgtaggaaagtaaccatagtttttttgtcatggagccccaagagttgcaagtgaacggatttctctcaggtctaaaactctgctcttttctccattgtgttacctgacctctttgccttttacattactttgaactgtaaaaatatttgaccttgtgtgtgtaatggttgctgggtcagtggtaagagctatggttttgaaagtgactaacagtgattataataaattattctggcttcagagggctactcatttccttgcatgtttagatgcaaaagacacagtttaaacaattagggaaatgcctttgtagcaaagtactctgtggaagtgttgcacagtatggtccccactgcattgtcctcttcttggggacctgggattcagtgaaatccttgatttttaatgtctaaatgttgtcccttccaactggtgcccttttttacatatttaaatgattagaatctaaaaattgcaaagactttgttggccctcttccttaatgggctctaccttgagcacagtgattcagttgaagaaaagagaccaaattaaaagctacatctctaaataaacaacaggtgctggagaggatatggagaaataggaacacttttacagtgttggtgggagtgtaaactaattcaaccattgtggaagtcagtgtggcgattcctcagggatctagaagtagaaataccatttgacccagccatcccattactgggtatatacccaaaggattataaatcatgctgctataaagacacatgcacacatatgtttattgcggcactattcacaatagcaaagacttggagccaactcaaatgtccaacaatggtagactggattaagaaaatgtggcacatatacaccatggaacactatgcagccataaaaatgatgacttcctgtcctttgtagggacatggatgaagctggaaaccatcattctcagcaaaccatcgcaaggacaaaaaatcaaacaccgcatgttctcactcataggtgggaattgaacagtgagaccacatggacacaggaaggggaacatcacacaccagggcctgttgtggggtgggaagagaggggagggatagcattaggagatatacctaatgttaaatgacgagttaatgggtgcagcacaccaacatggcacatgtatacatatgtaactaacctgcccgttgtgcacatgtaccctaaaacttaaagtatactaaaaaataaataaataaaaccccgtggtaaatttctattatttttgtgttaccttggcatctctttttaatcttccttgaacacaccaaattttttcttgaaaaagcttaagttctctctctctctctctttgctttgagatgtaaatgtgctatttattttctctaaaactcggtaaagccttcctcagataaacgttaacctttaccatttacaagaaagcaatttgaatccaactatcctttaaactggtgggttttactgatctcatgcctaaagtcctaaaatcaaaattctaaaatccttttgtctctctctatctttatgtgaacatgtatatgttatatgttttatcacatatatgtatatgtcacacatttatatactgttgacacatagtttcaaattaatgtaaaaataaatgagtactcacaaattaagtgaataagccaaaatgcttttctatacatgtgattttaataacctttggtgaatatagatagttttaaaattgttggaaaataaagtataaacgtcttcataatttaatttatacgtttttgcctaggtctgttggcaggcaggtttatattgtctttactagatgttttaaggtcatcaaacagttgcttccatatatatacattttcttaatttgtctgtgagcttatgtctttatatttgaagctttaaattctgagttctagatgagtgaccatagtaagaactggggacaaaacccatcccagcctctggctgtgccttttggccatgctgggagaggtgagattatccaggcattttcttcatagctctgttctttgtcttgggctttgcatctggtacatagttagaatgatttactccctagtttttttctactgaaaataaggctgtataagtctgtttttacattgctacagacaaataaatgaacctgaataatttataaagaaaaaagtttgaatggtctcatgattcagcaggttgtagagtaagcatgattctggcatctgctcagcttttgaggaggcctcagaaaacttacaatcacggagaaagccaatggtggaggaagacatcttatataatgggagctggaggaagagagcaagggttgcacactggtaaacaaccagataaaaactcactgttgctacaacagcaccaaggagaatggtgttaacatatgagaaaccacctccatgatccaatcacatccaaccaggctccacctccaactttggagattacaatttgacatgagatttgggtgggggtaaaggtccaaaaaattattattctctccatcttccctcccaaatctcatgcctttctcatatttaataatataagaatggcttcccaaccatctctagagtcttaactcattccagcattaactcaaaagcccaaaatagcaagtttcatctgagacaaggcaagttcctttcacctatgagtctgtgaattcaaaaacaagttagttactttcaagacacaagggagatctaggcattgggtaaatactcccattccaaagggaagaaataggctgaaagaaataggatacatgccccatgaaagtctgaaaccttgcagcacagtctttaaaacttaaagctccaaaataatctccattgaccccatatctcatattcagggcacactgatgtaaggcttaggcttccaaggttctgggcatcacaggaacattctaagagagtcacaaaagaatttgtagtgtggcttttgatgctaaacagcgtattagaccaagtaagtcactgaagagaaaaaagtcagaggagaagatgggtgagggtgacagaaatggaatggtgaaaggaaaggtctgataaaaatgtttaccggctgggcatggtggctcacacctgtaatcccagcactttgggaggccgaggcgggcagatcacgaggtcaggagtttgagaccagcctgagtaacatggtgaaaccccatctctactaaaaatacaaaaattagccgggcgtggtggcatgcacctgtaatcccagctactcaggaggctgaaggcaggagaatcacttgaacttgggatgcggaggttgcagtgacctgagaatgcagcattgcactccagcctgggtgacagagtgagactccatctcaaaaaaaaaaaaaaaaaagttcacccaagggctcatctggtaccttgctctgtgactaatatcttacacttttgatttactcttccactttcattttctgatgctcaaagggtcacccttctgctgaagatgagaaaagaggctgagggagctcaaatgagtggtctagagtcatccagctacttcatagagtttgtgtgtttcaccttgacatttgcgcacagacagaaaagtgagacatggaaggcaaagcaagtttttgctgtgggtgacatttatgaaagttacctgtgtttgcagaataatggactcctaaaatgtttgcaccctagctccagaacctgtgcatttacttttcttggtaaaaacacagtgcaggggtgataaaattaaaatcttaagatgtagatgttattctagattatctgggtgggcccattgtaatcagaagtgtccttgtaagtgacaaagaaaagcaggggcatcagtgtgagaatgatgagcctgtgaaactccactggccaatgctgggtgtgagcatgcatcaaaagacaaaattacaactaatgtagttatagattttatttttcatttattatttgaggcagctctcactctacaaatatagtgacagccctccctgggctatacaataacaaaacagtgggttttgtcaagtgggaaccagtaaacaaagccatataaataaataaattggttaacattagggtacttcaggtctcttttctgtaaaagttaaagcagaggaaacttttattatgctgtctcaggtagagtggaatctcctgttttcaacaaaaaacaaaggtctgttctggtatctctttgcttcattaaaacttcagttgtagactgtagcatttagcatgagtcgttctattttggagtctctaggctctcacttaggtgagagtgtgaccaaaatttaaagcattggcattcatctcagtaaccatcattttgggcttccatcatttatgagtttatgatgtcttcctgatcacacatttctttgagtttttgtcatttcagccaaagagagaccctttggtatttgttgatggctgcacacaaaactttttaaaaactcttgtagaattcaccacaccaaaatgtagaatttaaaaacctgtagaatttatcacaccagagaggctactagtatgactattaggaggataataccaaaagtttggagtatgcactttaggcaagatgcaaaccaagtaaaatagaatagatcaaagaatgagccagaagagtctagcaattttaaccaagtagtatgtttggtaacttctgtgattgagtcattatgatactcgatgtatttgtttatgtgcaacaatcagtgtcagaaactgcacaggctcctccctgttcagctggtagggaacaattttattatgtagcattcgacggctcattaaattaaaacagggagtgagaacaagtgagtctgaaaatgtaactttaaaaggggccactgtacatttgaagaaacaattgtgttaaagatggtgctaatgtcagccattgggtggactaaatgatatcttatgtaaaaatttgagggtgacatgatatatctgtcactctgttatgctactctcagaagctacttcacatgagattctaatgataccatcatcctgccaaatgaaagaggcaggcataagcatggacaaattaagaggggtaagagcctgattttgatgtgaagacttgttctgacaacttgggaaaagcttttgacagtatgaagttgtcaacttcttaccctggttttcagtttgagtgtctgtagttatggtgtcaaacatattggtgagctccgagtgactcattcttcaggcacgagggttttcctgtgaaatttacattgagctttccacctccaacttataggacttcagtaacagagcagattttgttcttactgattcaataagaaaaaactggatgggaggaactagaagaattcagggtctagtccagtctaccggtgaataataaaaactcgaaaacaatgaacagagctgcaatttcatagcaggtatactacactttttattttcaacattatttttctctctataggcatatctatttttaccaaagaaaatcccagtaggacaaatttgtttacaaagtaggtttagtcttatcaaactttgccaggattctttacataagcgcatcaagagtagcagtggaccacagaggctcttcctaaagtttggttcgctagtttttataagtagtctcagattaaacttttacgaacctcttgagatgaggaagccgaatgaaagccatcttcagactttgcctgcagtacatatgtgtccattctatgtatattctcaaatataacatcttagtcaaagccttggtaatataaccaatgttttgaaatgtgtccttttgtaaagagaagattcttactaaacttgtgcaaatagctgtatcatcataatcatatgaatactcatgaatagtttcccagtcctgggacagttaggtaaagagcaaaaatcaatgagcttcaattattgtttccaaaagtatactttaccaaatttctttagatataactagcttaaaagaagaaaaattccataaatctggaaaaaatcatttaaagaatcatcaaattttcaaataaaaattataaaaacattatccacattatcatttatttcaatgaaagtatttttgttctgcttggtctaggttggcacatttcatgaaggcatcatcctgtttgttaaagttttgaaagtctatagatggtccagtgatataatcttgaactgctcagaaacttgtatgcaagagtacttgtcagtatcttttccataaatcttttgaaatagaagcaattttggactgtagctgattgcaaatgtttcaggaagaatcaaaacaactatctgtgaatgaccaacatgtaaaatgactattgctaaaactctgataagagtttggtataagaaagggagtaactccagccagtactctagtcatgatgctgacagtggccccaactgagagaccaaaagaactttcttatcctgaagcagctgtcatggaaaaaaaaagaggagaaggaataaataataaagacagcaagggttttagccaattattttttgagatagggtctcactctgttgcctaggctggtgtgcagtggcacaatctcagctcactgcaacctgtgcctcccaggctcaagcagtcctcccacctcactctcctgagtagctgggactacaggcacacaccaccatgcatgcttaatgtttgtattttttgtagagatgggcttttaccatgttgttgaggcttgttttgaactcctagacttaagttattcactgccttggcttcccaaagtgcagggattacaggtgtgagccacctctcctgccggtttcatgctttttataataagaatgaactccttatgtaataataaataaataaatgaaattatttgctttggatgtaacaaatgtagatttagattgtccagagtcaggagctaagcctcatattttttttgttttagctcagtgtagagtgcattgaaggtgtcctaaaaataattccatatagtaagccaattttaaaccctgctcacagccaggtctgccaagtatgagccaggtaaaattaccaaaatgggtggttctgactgactccttaacaataacgtggcttacaaacaaagactgatatgaaatagttgatccaacccaaacagtttgctcattttccaaaattttctatacaaacatatgcaacttaccacaacatagagatcataatgaaaggtttcccttttattcctttaaatgaccatatgtttagatctgatgtactgacagcaataattctccattaagcagaaacctaataaaatttgaaaaatagtgattttatctttagatgatactcagatcttctgctacatatgtggaaaatggaattattgctagaaacattgtttaaagattagggtatgcaaggagtattaggaagtcaggaggttctttctttaggaaacagcttatctggattcattcaaagagctttaggcgagtttgaggtctttctgcaaaatgtaaattgctatctgagaaaccatatatagtccaatgatgaaagaatgcaaagccttagaagcacaggagacaattccagtatcttccctaaagttctgacaaaaaggaaaataactatcaaattcttcaactcgaatgcttattatgtatgtataagtcaatcggcagatgaagagaggctggaaatatgacttctacccctagggaactcacagtcttgtgggggccactaggggtggtggtgtgacctgcctggagcagcgctaagtatggacttgtgagtcaagggctatcaaaacctaagtaaactgattgctgttcagagaaggtagagttccattccacagtttgcaagaaggactgttttatggaggaggtcatgttggactagaccttaaaaagttggtagaatttaaaagcaaggatatggaagcaggaagagtgaaagtgagcagaggtacagaagtgaggcaagggtgagcagttttaattttttaatggtggtataaaatacacatcaatatttgccatattattattattattttggagacagtgtctggctctgttgcccaggctggagtgcagtagctcaatcatggctttctgtatcctccacctcctgggctcaagcaatccttgtacatcatcctcctgagtagctgggaccacaaacatataccaccatgcccagctaatttttatatttttgggagtgacaaggtcttcctatgttgcccaggctggtctcgaactgctggactcaaatgatcctcctgccttagccccaaagtgctgggactacaggtatgagccactgcacctgaccccatcttaaaaatttttaagtgcacagttgagaagtacatttgcactgtgcaaccatccgcggcaaccatcttcagagagtatttttcatcgtgtaacagggaaaattcatatccatgaaacattaactcctcattcttcctcctccccaccccaggtaaccactattccagtgtctctatgattttgactgctctagggacttatataaatgagatcatacactgtgtatctttttgtgactggcttatttcacttagcataatgtcctcaaggttcatccatgttgtaacatatgtgagaattttttccttttgaaggctgaataatatttcgttgtacggatggaccaaattttgtttatccattcatctatccatggacacttggtttgccttcacattttggctattgtaaataatgctgctataaacatggaggtaccaatatctgtttgggtctctgctttcaattattttgggtttatacccaggagtggaatggccaagtcatacagtacctgtagttttagttttctgaggaaccaccataatgtttttcacagtggctgcaccatcttaattcttatgaatagtgcacaggggttccaatttttccacagtctccttaacacttactattttctggggcttttgctttgtacttgagagtagccatttaaattggcataaggtataatttcattgtggtttacattttcatttccttaatgattagtgatactgatcaatattttctatgcttgctggccatttgtacatcttctttggagaaatgtttattcaggtcatctgcctatttttttaaattgggttgaatttttttttgctgttgtttaggtagagaaggcaatctttgaataccagtgatgtttcactaatactgggccattgatttcacaagaagttgtatgaggtactagaatgtgtgtttggtttcaatcatggctggggttgaatgccttttccaaaattcagtgtgaatttcaccagaagccacaaagggtccaggagcaagaacatggtgtgactgctctctgctaaagaatttcagcctgatgacagtgagcaggctacacatgagactgacacaagaataggtggagagggagactttccactggaagaaggtgattctaacatgcagaatcaccttcaaggagcaagtaagcagaaaaatagacaatggcacagtggccaggcaagaagacactaggtccagaatctgaggttcaaatcctagctctgtgagataaaaacatgccttggttttcccatgctactgaaacaccaggggttgggtctaggtccctttgctcactgcacagaaagccaaccactgagacaatgagcattgccagggaagaaggctttatttgggtgctgcagccaaggaggtgggagatcagtcttaaattcatctctccagccgactcaaattggagggtttatatagctgggaagggaggtagctacctgcagggaaaacagcaattaaggaggggtaaggaagcaatcatgataaatgaggggtctggtgtctcattgtctgatggtgatttggtgaatttcagtctcttgcctgaaggtctgtttcctaactcagatgactgacaaatgttaagtttcaagttttaagaccagatgggtcaatttctatgtttattcaaaaaccctgtaaatatcagttctatgtggaacttgagctggtttcccccaagtcatcacagttagggttaaatgatgcaatataagtaaaacaccagcagtttctgacacacacacagagtgcatgacacaagtggtgtgttgggacaatatagctcagtgaactccctttgtctactcagttatattgagtgatgaggcatctctgaagatgccactttgctacttctcccctgataatttcaccagatccagccatatgagcactgcaagtggggacttagcttaaatcattcctcgtatttcctgtgcaggcaaatcatttggcaccaaaacatgcacagaagtccaaatcctgctgccagctccacgactgatgacacagacagacttcaggattagtcctttaatctctgtcctctattaaatgaaggtcatcatgctgctgcctaatgtaaaaggattgtggggattttcatcattcattaccgattatcttattctttgaaaccccaagaaaactatacaaattccaaagtctaataggtacacaagggctttattatggatgatgaagtttcaaaggatgctaaaccaaaaaaaaattgtttttctttttttttttggatttatttttttatttatttattttattatactttaagttttagggtacatgtgcacattgtgcaggttagttacatatgtatacatgtgccatgctggtgcgctgcacccactaactcgtcatctagcattaggtatatctcctaatgctatccctcccccctccccctaccccacaacagtccccagagtgtgatattccccttcctgtgtccatgtgatctctttgttcaattcccacctatgagtgagagtatgtggtgtttggttttttgttcttgtgatagtttactgagaatgatgatttccaatttcatccatgtccctacaaaggacatgaactcatcattttttatggctgcatagtattccatggtgtatatgtgccacattttcttaatccagtctatcattgttggacatttgggttggttccaagtctttgctattgtgaatagtgccgcaataaacatacctgtgcatgtgtctttatagcagcatgatttatagtcctttgggtatatacccagtaatgggatggctgggtcaaatggtatttctacttctagatccctgaggaatcgccacactgactttcacaatggttgaactagtttacagtcccaccaacagtgtaaaagtcttcctatttctccacatcctctcctgcacctgttgtttcctgactttttaatgattgccattctaactggtgtaagatggtatcttattgtggttttgatttgcatttctctgatggccagtgatgatgagcattttttcatgtgttttttggctgcataaatgtctgcttttgagaagtgtctgttcatgtccttcgcccactttttgatggggttgtttgtttttttcttgtaaatttgtttgagttcattgtagattctggatatcagccctttgtcagatgagtaggttgtgaaaattttctcccactttgtaggttgcctgttcactctgatggtagtttcttttgctgtgcagaagctctttagtttaattagatcccatttgtcaattttgtcttttgctgccattgcttttggtgttttatacatgaagtccttgcccatgcctatgtcctgaatggtaatgcctaggttttcttctagggtttttatagttttaggtctaacatgtaagtctttaatccatcttgaattgatttttgtataaagtgtaaggaagggatccagtttcagctttctacatatggctagccagttttcccagcaccatttattaaatagggaatcctttccccattgcttgtttttctcaggtttgtcaaagatcagatagttgtagataagcagcgttatttctgagggctctgttctgttccattgatctatatctctgttttggtaccagtaccatgctgttttggttactgtagccttgtagtatagtttgaagtcaggtagtgtgatgcctccagctttgttcttttggcttaggattgacttggcgatgtgggctcttttttggttccatatgaactttaaagtagttttttccaattctgtgaagaaagtcattggtagcttgattggaatggcattgaatctataaattaccttgggcagtatggccattttcacgatattgattcttcctacccatgagcgtggaatattcttccatttgtttgtatcctcttttatttccccaagcagtggtttgtagttctccttgaagaggtccttcacatcccttgtaagttggattcctaggtattttattctctttgaagcaattgtgaatgggatttcactcatgatttggctctctgtttgtctgttgttggtgtataagaatgcttgtgatttttgtacattgattttgaatcctgagactttgctgaagttgcttatcagcttaaggagattttgggctgagacaatggggttttctagagatacaatcatgtcgtctgcaaacagggacaatttgaattcctcttttcctaattgaataccctttatttccttctcctgcctaattgccctggccagaacttccaacactatgttgaataggagtggtgagagagggcatccctgtcttgtgccagttttcaaagggaatgcttccagtttttgcccattcagtatgatattggctgtgggtttctcatagatagctcttattattttgagatatgtcccatcaatacctaatttatggagattttttagcatgaagggctgttgaattttgtcaaaggctttttctgcatctattgagataatcatgtggttcttgtctttggttctgtttatatgctggattacatttattgatttgcatatattgaaccagccttgtatcccagggatgaagcccacttgatcatggtggataagctttttgatgtgctgctggatttggtttgccagtattttattgaggatttttgcatcaatgttgatcaaggatattggtctaaaattctcttttttggttgtgtctctgcccggctttggtatcagaatgatgctggccttataaaatgagttagggaggagtctctctttttctattgattggaatagtttcagaaggaatggtaccagttcctccttgtacctctggtagaattcagctgtgaatccatctggtcctggactctttttggttggtaaactattgattattgccacaatttcagctcctgttattggtctattcagagattcaacttcttcctggtttagtcttgggagagtgtatgtgtcaaggaatttatccatttcttctagattttctagtttatttgcgtagaggtgtttgtagtattgtctgatggtagtttgtatttctgtgggatcggtggtgatatcccctttatcattttttattgtgtctatttgattcttctctcttttttctttattagtcttgctaggagtctatcaattttgttgatcctttcaaaaaaccagctcctggattcattgattttttgaagggttttttgtgtctctatttccttcagttctgctctgattttagttatttcttgccttctgctagcttttgaatgtgtttgctcttgcctttctagttcttttaattgtgatgttagggtgtcaattttggatctttcttgctttctcttgtgggcatttagtgctataaatttccctccacacactgctttgaatgcatcccagagattctggtatgttgtgtcttcattctcattggtttcaaagaacatctttatttctgccttcatttcgttatgtacccagtagtcattcaggagcaggttgttcagtttccatgtagttgagcggttttgagtgagattcttaatcctgagttctagtttgattgcactgtggtctgagagatagtttgttataatttctgttcttttacatttgctgaggagagctttacttccaagtatgtggtcaattttgtaataggtgtggtgtggtgctgaaaaaaatgtatattctgttgatttggggtggagagttctgtagatgtctattaggtccacttggtgcagagctgagttcaattcctggcttgattaggtaaataaagcagccaggaagctcgaactgggtggagcccaccacagctcaaggaggcctgcctgcctctgtaggctccacttctgggggcagggcacagacaaacaaaaagacagcagtaacctctgcagacttaaatgtccctgtctgacagctttgaagagagcattggttctcccagcacgcagctggtgatctgagaaccggcagactgcctcctcaagtgggtccctgacccctgacccccgagccgcctaactgggaggtgccccacagcaggggcacactgacacctcacacggcagggtattccaacagacctgcagctgagggtcctgtctgttagaaggaaaactaacaaacagaaaggacatccacactgaaaacccatctgtacatcagtatcatcaaagatcaaaagtagataaaaccacaaagatggggaaaaaacaaaacagaaaaactggaaactctaaaacacagagcgcctctcctcctccaaaggaacgcagttcctcaccagcaacggaacaaagctggatggagaatgactttgacgagctgagagaagaaggcttcagacgatcaaattactctgagctacgggaggacgttcaaaccaaaggcaaagaagttgaaaactttgaaaaaaatttagaagaatgtataactagaataaccaatacagagaagtgcttaaaggagctgatggagctgaaaaccaaggctcgagaactacatgaagaatgcagaagcctcaggagccaatgcgatcaactggaagaaagggtatcagcaatggaagatgaaatgaatgaaatgaagtgagaagggaagtttagagaaaaaagaataaaaagaaatgagcaaagcctccaagaaatatgggactatgtgaaaagaccaaatctacgtctgattggtgtacctgaaagtgacggggagaatggaaccaagttggaaaacactctgcaggatattatccaggagaactcccccaatctagcaaggcaggccaaagttcagattcaggaaatacagagaacgccacaaagatactcctcgagaagagcaactccaagacacataattgtcagattcaccaaagttgaaatgaaggaaaaaatgttaagggcagccagagagaaaggtcgggttaccctcaaagggaagcccatcagactaacagcggatctcttggcagaaaccctacaagccagaagagagtgggggccaatattcaacattcttaaagaaaagaattttcaacccagaatttcatatccagcccaactaagcttcataagtgaaggagaaataaaatacttaagagacaagcaaatactgagagattttgtcaccaccaggcctgccctaaaagacctcctgaaggaagcgctaaacatggaaaggaacaactggtaccagccactgcaaaatcatgccaaaatgtaaagaccatcgagactaggaagaaactgcatcaactaacgagctaaccagctaacatcataatgacaggatcaaattcacatataacaatattaactttaaatgtaaatagactaaattctccaattaaaagacacagactggcaaattggataaagagtcaagacccatcagtgtgctgtattcaggaaacccatctcacgtgcagagacacacataggctcaaaataaaaggatggaggaagatctaccaaggaaatggaaaacaaaaaaaggcaggggttgcaatcctagtctctgataaaacagactttaaaccaacaaagatcaaaagagacaaagaaggccattacataatggtaaagggatcaattcaacaagaagagctaactatcctaaatatatatgcacccagtacaggagcacccagattcataaagcaagtcctgagtgacctacaaagagacttagactcccacacattaataatgggagactttaacaccccactgtcaacattagacagatcaacgagacagaaagtcaacaaggactataactttttataagatacatatgggtttactactaaatattcttaaaatgaatataatgctataatattcttattttgaggtaatatatatatatagtctgcaaaaattaggtttcctggtgtcattaaccacttatgcaattatttttctgaaatgaatacacatgctgtacatgcagttttgcctgatataagttttaaaacaacgtatattggaatcttggaactaaaaatgagaaaatcagtgtccccttgatgtcagtttcagtttcaactgcacttgctattttatttttaattggttacttacattatctgtacattgtcacagttgatggtatttgttttcttctctgtgaccatagtttgcacagatttaaccataatgcatccttaaagattacaagaaatcttttagacacagctcctctcagttgctgaggatcgaacctttacttatgtgttttcttcatgaatatatatttcctgtgttgtatgtttgtacatagctatttgtagcctttgaagtttatggaagtttttttggttgcattcttggggtatattttctttccctgatgactgttaaggttaggatatttgacccttccaaagctcatgttgaaatttagtccccaatattggaggctgggcctaatacaaggtgtttgggtcatggggacagatccctcccattgaatagattaatgtcctctcctgatggtgaatgaattcttcctctattagttcctgcaagacctggttgttaaaagagcgggccacctccccggtttctctcttgcttcctctctcatgtaatctctgcacatgctggcttcccctcctctactgccatgaatgggagcagactgtggccatcaccagatgaagatgcccaattttgaactttccagacaccagaatcataagccaaatcatcccttttcctttataaattatccagcctcaggtattctttatagcaacacaaaagggacaggactttttatatcttgccccactgtcttctagcatttcatgtgtcccataaagaaatcttagtctcctaggttttttttttttctgaatatccacagaattctttccataacttcaaataccaggaatttattggggtatttgttaattattcaatataaacacagccttgtaattcttgggctatttctgtctgcagattcaaatttcactgtatttcaggaatttcaccttgaattgtatctttgaaaatttgttttcatgttccattcattttttaacccatgcaaggcatttagtgttatagatatttgatctcttccctaccactccctcccatccccctctttttctctatctctgtcttccgtcttttacttttcgttcttttccatctcacatgctcattttttcttctcaaaaccatccttcgaattccttcagtggtgtctcatctcccttttgctgcttctatcatgacctttgattttggtctctttttgtctctctctctctgagattctgaggctctgcctattccgtttttattctcatttgtttctaatttgtttccaagactctgtctactcccttttcattctcatttattactaatttatttctgaggctttacccactcacttttcattcccgtctaacctaatgtattatcagttcttccttaaagccttatattgcttctttaaattctcatttcagagaaacaatagtgtctttaattgattccttagaaataactttgttcatggtttttggctgcgttgtggtatataatctttccatttctcatctttgtaaatcatgttctgttcttttttatttcagcatcattttaaaggccccccactggctccaccctttttaagtagcattgttcctcatctttttggactagaattttgggcaaagctctggggaaaggggaagaagaaagtgccaaacaaacgggaagattgggtttcagtctgttatctctaggatgtttctcagctggacttggcctgtgggttatctggtccagcatagcaggatatcttccgggctcacaaggaggctgtgcattttacagaacattttaatgtgattatttcaccttgacttatcttcaccagacagctttgggcaaagacggccaggtagcttatatcttattgactcttccttctatcctataccatgattgaaacatgatgtaggcttccaaaaccaggccatgaaccttgatcttaactttctaagcatgggatagacacatttcctttcaatgtgtgccacccatccactttggataactatgagctgggtccactctgcctgagtcacacatagaaagacaccttctcttggagttcccaaatacctccatccacttctcatacacttggttatcttcctgcatctactgttatccagtgttataggggatctgtagcttcattcaagataacatttgtttgtttcttcttctcttgtttgctttggattggtttcataaaggaaatgagacaaaaatatatttatactaccatttgaaaagaaaagataaattccttctttcaaattcattcctttttctttctttccagtgaatctcatggggtgaggggagcactgaagggaatgtccaatctactcaagtccaaaaagtcacaggtataaggcacagaaaattttaccagtctaatgatggcagttttaatgctatataaggacagactatacaaaaatgctattaatgaggatgaggagctacaggaacaaacctgatgaggaactgtaattctattagagggatgtatatagccatcatttttttctttaatccaaaacaattagattgcttatatacacagccacattcaattctaaggtatttgattgaaatgcaccagaagatgcagatatatatatatacttttaccttagcttccattttattctttccctcccattttatcagtgctatagagtacatttttcccacttgagctcaacatgctgttgtgcagaaagccttctcttgggagttcccaaaatgttggcccagatgagtgcagcagacatttggcccaggtgagcctagcagatatttacatgaaatattagggagcatccatctgggccatgtgacttaggctggcgatacacgacagaggattccaatttgttgtataaatcacccttagagcccccaacagtgaacacatagggggttcttttcattttcatgatgtttaatataatctttaaaaataattaaaattaggtgaagtgtgtagatttctgagagattacagaaaggcattagttttgatacctcttgcttgtagcatttgaccgacataaacaaactaaaaggtttaaaaagaacagggattcttcccagtggtatagggcaatgggtagggaaaaaaagttcaaaattgataaatagaccaatattattctcaaaactcataccattgtgattgggaagaaatgaatacatattacttagtcacatcatgttaccatatacttatattaacacaacaaaaaggaaattatacgaaaaaaagtcatacatttaaaggatggaagaaaatcctaggtttactcagagctcaagatcccattgggatgaatattgttctttcctcggattgtgccttcatttcattcattcacttatgtatgtatttatttatttagagatgggatctatttctgtatttatttatttattgattgattgatggagtattgctctgttgcccaggctggagtatagtggcacaatcatagctcactgcagccttgaactcctgggcttaagtgatgctcctgcatcagcctcctgagtagctgggactgcaggtgtttgccaccatgccccgctaatttttaagtttttttttgtattgattgggtttccctatgtttcccatgctggcctttaacttttcagctcagcgatcttctgccctggcctcccaaagtgctgggattacaggtgtgtcccttcatttctaatgaaggaaggttttcctttgaatatctcacaacagatatttttaaaagaaaggcagatttgagcaaccatcaacaaggtttacttgaaaattaatctgatatttacaagtgcattatataacagaaatgttacagactgaattgtgccacacctaccccaaaactcttatgttgaaatcctaacacccagtacctggaatgtgattgtatttggagatgggtcattaaggagtaaattaaagtaaaatgaggtcacatgggtgggccctaatccaataggactggtgtccttataagaagaggagatgaggacacagatacacgcagagagatgaccctgtgaggatacagggagaagacaccatctacaagcccaggagagaggcctcaggaggcaccatccctgctgacaccttgatctcagacctctagcttctagaactgtaagaacaattgttgctgtttaagcattcccatatgtgggactttgttatggctgcctgagcagcctaatgggagtgcaaagactttctttaaataatgtataacaatgttggtttggaaatgactatccagtgttgagttcaaaactttatctttatgggtgctgctatgagtgagtgtctaatttgggggataatattgacattcttcgggagaaatgcagactccaatcagtgcagaaaatggcacagaataatgtttaaatatgccctccaggccataacatggttgggttaggaggaggaatattaaccattcccatcctaaaacacagaattttgggtttctttctgtgagttcaccacctctgaccttcacaggtaagggaccatcacacagacatctgccattttcatataactctctatccaaacaaaggctgaaaattcagcatggagaaactctcccagcacccgtggtcatccccttgacctgcatccccaccctgggcactggtgtgggggtgggattctttatgaacttgggccccaattctgctttccctggaaagctggacccacacaacatcaccctcatatgcagaccctcatgtgtgggcacctgtgaatacccagagctgggggtctgctctaggagctggttcaggacaggatactcccatccaatctgtgcccaccatagaaaagagccagccaagtgcctgctactacagggctcttcacacatggaaaagctgccctgtggaagtgtcccaggaaagggcagggggacaaaaaaaggtcgcagtgatttgcctccagacactggacactcttccctggagagtacagggcatgctgctctccaaacctgatcttgctacatttgtgctgcccacagtagtggtgccactgagttttcaaagaagacagcaggccctgaattgtgcaaggaaaataagtgcttgaattttgtagcatgcatgcagtgttctacttttaagaatggtaccaggctcctctgatattcaagaaaggcccccaacagctcagatggtagttttctaatcctgtcttcccatatgcacatttacctcctccacccaagaactgaataacagacatgagtgctcaggacgtcatgctgtctactgtcatccccttcctgagaccccctctccaaatctcttgacaaccctcttcttagctccctctttctttctggcctgttacactcaacctctccagcatcctaacaagtacccactcaaacctatttcctcccctgctgtgctgcttcttcaaaagtgctttgcttctcatcctcaccttctttccttgccctcttccctgcttccctcttcaaagcacttctcagctacaaatgagaaggaagcgatctgattaaacaggtgatgagcagagtcacattctgaggggatttgcatttttaaaaggagattaatgaccacatctgaaaatgccaccctggaatcttatgcagagtgacaggggattggggatgagctccattcagggcaggaagtgagagtttggatctgaagtgcttttcagatgctgaagtcataggaggttgcagttgcttcctgggtggagccataaacaaacatctcttctgctgagtgaagtctgagaagatagaggcaatggtgacccaggagctctggaattatctggctgtgttacacttgcaggactacacacatttaagtgtaaaaagcatgctttttgtccacttggctgacctcttagcctgctctcctcttattgttcccttgaaggcatcattttttaaagagaaatttaaactccgtccatctcatcccctttggaagaaagttaagattcctttctgagctctttcatcatctggagtttaaaagcttcccctcctctgtcaactctctttgaatccctcatgtcacaccaaacttcaaaagagacaaataattttgcatgactccctgcaggctccattttgccctgtagtgacagccccatgtcttgactttcctgattggaaaaacttctcaagctttctacattcatgatctctgcttcttcagtgcaaccttctccagtttgtccctgatgtccaatggtccctgcattaatcctgtccaagccacaggtgaccctcatatcatctcagcttctacttcccattcctctctctctctttttttttttctgagacaggggtgtcactctgttgcccaggttgatctcaaactgttgagctctaaagatcctccggcctcatcttcctgagtagctggtaggggtgtgagcccttctgcttggtctccagtcctttgcttttcttttttgacctatacaacatttggtagttgatgtccatgttcatgtaattgtcttctctggcttcttggggccacagtgcattgccttctccctcttttcatttattatcttttcatctagtaagacccatcatcccctaaagatgtatattttcttcaaagcaaggattggcgtaccttcacaaactgagtctccaatgacaacataaactgaaatgcaatataaatcatggacagatgtgagctcatcttctgcttcctgtgtcctccgctggttcttcttaccaacatcatgtattgttaaataagcgagtgatattaagttagagaatggactgagtccattaattcatttggcacgctccaaagtcctcacctgagatctatctactctccaaattacacttgttagaaatacaggaggggccgggcgcggtggctcacgcctgtaatcccagcactttgggaggccgaggcgggcggatcacgaggtcaggagatcgagaccatcccggctaaaacggtgaaaccccgtctctactaaaaatacaaaaaattagccgggcgtagtggcgggcgcctgtagtcccagctacttgggaggctgaggcaggagaatggcgtgaacccgggaggcggagcttgcagtgagccgagatcccgccactgcactccagcctgggcgacagagcgagactccgtctcaaaaaaaaaaaaaaaaaaaaaaaaagaaatacaggaggatccttttcacatgagctaattagggtgaatacatgtaagtgttggtaagaagtactagaaacactggaatttgtgagatttcactgaagaaccagcttccacccagtccttcacattgttctcttttggtagtttcttgtcatttcctccttttattatcaatagagctgctgtgaacatgcatgtacaagtttctgggtggacatatgttttcatttttattggggggggtagacatcaaagaatagaattgctgtgttgtatgatgagtctgtgttctaacatttcagaagctggacttcaactgcttcctgatttcaccttccacaccatttctgtagtgaggcccactccttggccttataagacctgaattaagttaggtgcccagagccgttctgtcatcgactctgttctttcccttgctagcctgtgtaataattggcaatcagacctttacatgagcaatggtttcatatgtctccccaactatattacaagttccacaggggcagggctatgtctatctccttgacctctgtatctgcgatgcctggcagagggctatgaacactggttacgctccataaacactgggagacaaagaagggtgtcagtagagttagtttttttgcttttttacccccagaactcttagaaaataatttgagctattccttcaaggaagtcctggggcaggtgatcattcatagatgacatgagggagtgcacagcacatgagtttgcaggaaaatgcaaaccccacgttgaaatttgatccccaatgttggagatgaggatttacaggggggtgtttgggtcatgggggcggatccctcacgaatggcttggtgctgccctcatggtaatgagtgcgttctcttttcagtcctgcaagagctgattgttagaaagagcctggcaccttcctctcctctttctcttgcttcttctctcaccatgtcatctgtgcacacagcagctccacttcccattccaccatgagtggaagctccctgaggcctcaccagaagcatatgctggtgcaatgcttcttgtatagcctgcagaactgtgagccaaataaacctcttttctttataaattatccagcctcactcaggtattcctttatagcaatgcaaaactgactgagacagggtatcaggagacctagctttgcctgaatctgagaacttcatcaggacttttggaacaatttagcccacaggtccaaggctgatttttgtcacagtgaagttcaggtagtaagaattctcactggtggctgttgaggatggtggtggtggggatgggtcatatggagaattagcagtgggagactagaaattaaagtggagaaagggaagaattaaaagtcaaaaacagtgtgagggaggaaagcaatggatataacacctcaaatctttatccttgagaggccttaaaaaatctacttaataataatcagatgctattctataagtactttgagactagacatgtgatgacttttaggaacctgtactgtggctgaaaatgcatgcaaatctagttgactcagatccagtcttaactggctcataacttgcttcatatgcatgactgtacgttagcaaggaaatgagagagaataacagcacatcacataggcatgaaaagtatttgcaaagcagcagttctcaaaaatgacattttgcagtgttttccagaagcagattcagaaaactgaagaccaaagtaatgatggagccgtctcatgcctagatgagcagaagcataccaaaggcttagtatttccccaagtagtaggcacctcaaacttatttaaggaaaatactcttcttgatgaaacagatactgcagtcgaagcaggaatgtgtttggtgtgctgccttaaatagcatgggtagatgttcaaacatgttaggactcgctggccctaggaaagacccgcaagtagatactttccacaccaggaaagtgacaatgaaacaccaaacaccttttctcctctaattaccaaggaaaatatttctttcccaatggtggaagacaataatgttgggaatgatgaagttttctggagtgtgaagtggatatgtcttataagtttaatccacagattcaccacttcataagtggataatcgaattgtgcctcagtttcctcagacttggggatattaagagaaccctcagtcaccacaaggtgggtaccagcataagaaaagagtgtagcaaaagcccaggggtgcatgttcttaaagtgcctagtgtgggattagaatgacaagtggtagatgacctacttgtgcagaaatttagagttattttgtgattttcaaatgatcatgggtgctttccatatgctgtccagactaggggtgctgcagctagaaagggaagaaggtttccatatttcctgagattggagtcacatcctctcaccaatgcactcacctgctgactaaccagtgtacttctgggaattgcaaatgcatgaaatggcacccattctagactagtcgcggcagtgttggtgatggccacagaccaggaacgaccttgacgtttatccgtagggaactgggtcatgagccatgatccacatcatggatactgtgcagctgtggcaatgaatgaggtatccttctgtctgtgcaccgggaaaggtttccaagatacactgcacagtgagaaaaacaagaagcagaacaatgcacggtgtgctacctcttgcattacaaaggaggaaatgtaaaattaatttacaaatggccaataaacacatgaaaagatgctcaacatcactaatcattaggaaaataaaaatcacaactacagtgggataccaccttacatcctttacgatggttgttcccaataaaaaaaaaaaaaggaaaacagaaaagaaaagtgttggcgaggaggaattggaatgcttgtgtagtgtttgtgggtttgtaatatggcacaacaactgtggtcatttctcaaaaaattaatcatagacttaccacaagatgcagcaattcggcttctggtgtattccaaaaagaacggaaagcaggggccccagcagatatttgcatgtctttgttcatagcagcattattcacaatagctaaaagttggaaacaagcccagtgtccatccatccatgaatgaataaacaaaaagtggtctatgcgtacaaacaaatgggattcagctgtaacaagaagggtgattctgatgtgtgcttcaacatgattaagccttgagttctttctgctaagtgaaataatcagactcaaaaagacaactactacatgattccacttaacagaggtgcgtaacgtcatgaaatgcataggcagaaaatgaaaaggtggttgtcagcggctggagggagggggaaagaggagttggtgtttaatgggtacagaattccagttggggaatatgaaaaagttctgggtggggatggacagtggtggtggttgaacaacaacctaaatgtacttcctgccactggatgtacacttaaaagtggttaaaatgggccgagcgaggtggcttgcgtctaatcccagcactttgggaggtcgaggtgggcagatcatgaggtcaggagattgagaccatcctggctaacatgatgaaatctccgctctactaaaaatacaaaaaattagctgggcatggtggcatgcacctgtagtcccagctactcaggaggctgaagcaggagaagtggttgaacccgggaggtgaagtttgcagtgagctgagatcatgccattgcattccagcctgggtgacagaagaggaacccttctcaaaaaaaaaaaaaaaaaagacagaaaaaaaagaaaggaaaaaaatggttaaaatggtgaattctatgttatatatatttcacaataatttacaataattcctattgttttgcataaaacagctgtagaaagctttgcaggtcatgaacagcacagctggccactggggctggcgtggggctaggacctgggtgcatagggaacagggatgagacacaggctcttcatgcctgcacacatatacagatacacacagatggaaattactgagccatctaaatacaacacctattcaaaaaatcaaacagaaaaaggaaatgtaatggggctgaaggatgagggtaggtggggtggctgctcaggaggactgtggaggccacatcgcctaaccttcgaggcctctcttagcagctggagtgcatcccggggacttgggagctctggaaagaggagcaggaaagggccatggccggaggaggcctgaaaaagatcatctctgccacagagaagaagctggctcggatgctgctggcccctatggagacagggagacccggggagacaactgtattcattcaaggaggaatgggtggtgatgcaaacttgggtggaggccacagggtgcagaagacaggacacagcagagagagatgtaggacatggaagggacagaaaggagtgaccacaggacataaaggggcaaggaaagtggaagcatgataacatctgctgggcatccggctgaggggttgggtgcctagggtgcccttccctaagggagaaccccaggagcagattcagagaaaaccgcccagctcactccagcaagaatcagaaaaggaccggttaaaggagagggtaggaaggtcaccaagctccaagggccctcatgaatccggcttggaggccacagggcccagggcaaggacaaaccacaggcacaggacagctccggtcaagatcttctggctactgcaggaggcagaaaccacaccctgcaccctgcactgctgaggctggcgctggagtccagaagcttctacaccagaagcttcggtcccccatccctgctcaaaaaattaaaacaaaaacaataacaaatcggtgtcatgcaccctctgcttcctggtgctgttcgggaccctgagtctttcacgggagcacctgatggggaaagcctggacccgtgtcggtgtccctcctgcaaggagtgctgggaaaatgaactttccagcttcctccttgcgaaggcagaacattccccatgtgtactggtggcatttaaaaactgcagggcagccagagaacatggactgtgttccaccgggagagttcctggcgggatgtcccggtgcagaagcccgtcccaaggtgggtatttgagctgaggaactgagaagccggtttctgcctagagttagagatccgagaggcatcagcacatggaagggagggaatctacgatgcctcgagggtgggagatcagatgaaccaggagaggcagggcccgggaggaaccccggggagcagcctcctttaaagcctgggggaagtagcttcagagaaggtggggtaggttgggtgggggttgctggaaaaatataattaagaaacaaatttctgctcagcccagaaacccccctcacatccatagaagtaaaagaaacttgtcttatgattgagtaagcattaagccaaaatgtgatgcaatctgctaagagatgacaaagacagaaagaaatcccacctttgtatccagccaagcaggtgcaacccgttacacacatggtctccagatagatggtgactagttcccagttgagaggactcaacggcaccatttgtcacacgtagttcatcctaaattcacccagtaactgtgttgattctctgtgtggttaattggctttatccacaggaaaaagaaacctctcatctatgacaggaggtagttttgcaactgggagtgagatgcccccagaactgaggttccttccttctcacagaaactgggagacaggggtgctttctgcccggatgcctgcctttcaaagagaggtctcctatggccttgaggaggagaattctgggttgtgaggcaggcaagatacttatgtatgctttagaaagctttgcatacatcttcaagggatagagaaagagttttcaattacacctcttctaaaaaaaatgatctcaaagtccagcctaggcaacacagcaagatcctatctccacacacacaacaataataataaatttgctggacatggtggggtgtgcgtgtagtcccagctactcaggaggctaaggagggaggatcacctgagcccaggatgttaaggctgcagtaagcttagatggcagcactgcactccagcctgggtgacagagtgagactctgtcaatgaatgaatgaatgaataaatgaatgaatagaaaatgctctgagtgaaaagaggagagtctctttatctttttgcaacaggctaaacaaagtttttaaaaatgtatatttgcctcacagagattattccaggaaaagaagtggccctcagtgtcaaaggatgcaaaactaacctctgagttcctggcaggtttagcaataaaggaggatgttgctgatctcagtacaagcaatgttagagaaaggggaagatggaagtggacaaggacgagtgagtggaaggtgacaaatggaagcaaagaaacgtatccagaccattgaagatgcttgagcgagaagaaagaggcggtggagggaatggaagcccgaggaagtcatatgttgcaataaggggcctcagagcacgtgtagagtgtggagcagagcccttgcagaggggctgtggaaggctggcagggtgcaggtggccccactctccgtcaccctgaggagtgtgtggtcagagttaaagctcagtctgtttctgggatcaggtaagaggtgagcgtccggagaagacaggcggatcttcagatcctgcagacctccaccgtgccctctgtccctctcgactgctttttctccatctccattgtctggctcacattggtgtcactttttcatttctccctgcccgtcttttctcttttctcctctctttttcttaacccttgtacctttggaagtcccactaacagaatttaaacagcttttcaagttggttttttgttcccagaaattgattttagactctccatgaataatgtggaaatcaaatgagtataagctggttcatctctctgcaaataaacaaataaaatctacattccaatgtttcttcttccagagtagcccgcacttgattttttttttaattactgtcacttgcaatagatttttaattcctgtaacctggctacacaaataccatggggcaaaagccttacttcctgtgagaggaaaccaggcttgactagcctcatgctggctttgaagaagtaaaatcaggggttgatgaatttgcatagggtaaatatcaaaggtcaaaagtaaacaataggtggtagagggaataccccaaattataaaagaacaaactgtttaagccacaacagaattatcgtagaaataaaccacggtccttcctgctaaaatattccacttagaattgtaaaatattcttctcaataactcctggaagagcctactcataaattaatgaggctgggagcagtggctcacacctctaattccagcactttgggaggcctagacgggcagatcgcttgaggttaggagtttgagaccagcctggccaatatggtgaaaccccgtctctactaaaaatacaaaaattacccaggcatcgtggcaggcacctgtaatcccagctacttgggaggctgaggcaggagaatcgcttgaacccaggaggtggaggttgcagtgagccaagatggcaccactgcactccatcctggatgacagagtgaaactccatctcaaccaaaaaaaaaaaaaaaaagaaattaatgaatgtaagagcatctatgttccaaatgcagtgtattattttatgcaggctttcacaagctccaaaagattcaccgtgcagaactggacgttctagagaaagaccacgcctcctcctgcaggtaactcttcattcaggaagcagctcttggcttatccctgggcttagtggaattggaatacctgaccataggacaccaagggctttaggacctgagtggcacatcgtgtcctggtgacatctgagttacctggggcgtgcacagcagcctccagcatcccagggagagctgtgtatggggtcaggctcaagcaggtcccagggcaccagtgacccaatgggtgaatcagactcccgtggcacctgctccttctgtatctccctctgccatatatatgagctcatgggaagcactgtaacctcttacagaggaggaaagttcatggacttctagcttctagaactgtgatacaataaactcctgttgcttatctactcctctgcagtattttgtcatggcagccctagcaaactactacagggactgtgggggttaggatgacaccaagcatcaaatgccactccctgttccattattatgtaatgtccctctttgtcttttttaactgctgttgctttaaagttagtttttttgatataagaatagttactcctgctcacttttgtggccatttgcatggggtgtctttttctacccttttaccttaagttcatgtgacactttatggttaggggagtctcttgagggcagcagatacttgcttggtgaactattatcaattctgcaattctgtgtcttttaagtggagcatttaggccacttacattcaatgttagtattgagatgtgaggtactgttccattcatcctgctatttgttgcctgaataccttggttttattcatttatttattgtatttgtgttttatacgtcctgtgagattcatgctcaaagaggttctgttttgatgtgtatccaggacttgcttcaagatttggagctccttttagcagttattgtagtgctggcttggtagtggcaaattctctgagcatttgtttgtctgaaaaagactgttatctttcctttatttatgaactttagttttgctggatacaaaattcttggctgataattttttttttttttttctgagatggagtcttgttccgtcacccaggctggagtgcagtggtgcgatctgggctcattgcaaccttcgcctcctggattcacgccattctcctgcctcagcctcccgagtagctgggactacaggcgcctgccaccaggcccggctaattttttttgtatttttagtagagacagggtttcaccatgttagccaggatggtcttgatctcctgaccttgtgatccacccgtcttggcctcccaaagtgctgggactacaagtgtgagccaccgtgcctggcctgataatttttttttaaggaggctgcaggtgggtatgcatgctcatttgaggtgttcttcccttattgaagattactaaaatcacatgtgttgaaaagcatttggtattatttacttaattgatgagtacccatttatttttacattaatttgataccatgtataaacaatatataaacataggtatggacatatacatatgtgatatgtgatacagcatagaacatatacttgtgcacataaagatagagggagacagaaatacttcagatttttgattttaaaactttatgcatgaacacataaaactcactgttaaaaaaaatagctggatttaagttgtgcttttgtaaatagaaaaagttaacatttatctgaggaagcccttgctgagttttagagaaagtaggtagtaaatttacatctcaaagcacacacaaacacacacacacacacacacacacacacagagagaaggagtttgggtgtgttcaaggaagattaaaagtagatgccaaggtaacacaaaaatgatagaaatttataacaggattttataaggagaccaattttatttccatacatagcttttattttggtctctgttttccaactttactccaggaaacacactacacaggctcccttcttaagtgctggtgggccactgcacatgcagacagcccactttaagggaagaatcaggggagaagagatgcagaccccagaattatgccaacatacaaaagcctaagtcaaaggtcaaaccacacacttgaaatctcatcacctgtttggccctgttttaagtgtgctttactttctttaatttctgctctaaagcttttaaataaactttcactcctgctctaaaatttgcctaagtctcttcttctgccttatgacacttagttgaattctttcttctgaagaagcaagaattgaggctgctacagacttgtacagatttgctgccattaatatagtttagtgccattctacatgatagaatatatatattcttatatttatatatatatatatatataaaatttatgtattcatagaggccttgaatctacattcttgctgcactttatgtaaacaatccaggtataagactaaaacttattttggaaatatattggtcccatatgatttctatttcataaaaatgggagacaggagggggaaaattatttttcagaaggaaacaacagaaaaatggttattacattttagatctgttcattttttttaaattttgttatttacctacaatttggactgaatcctaaattttttcctggctacaaatttcaaaactaatggtttcagaattttcttccatttttcttccattttggtatattataaattaaaactgtgctttttaaatttttatctttttttaattacacttttaagttctgggatacatgtgcagaacctgcaggtttgttacataggtatacatgtgtcatggtgttttgctgcacccattaacccatcatctaccttaggtatttctcctaatgctatccctcccctagtcccccacccctcaacaggccccagtgtgtgatattcccctccctgtgtccatgtgttctcattgttcaactcccacttttgagtgagaacatgcggtgtttggttttctgttcctgtgttagtttgctgagaatggtggtttccagcttcatccatgtccctgcaaagatatgaactcatccctttttatgcctgtattgaattccatggtgtatatgtaccacattttctttatccagtctatcattgataggcatttgggttggttccaagtctttgctattgtgaatagtgccacaataaacatatgtgtgcatgtgtctttatggtagaatgatctataatcctttgggtatatacccagtaatgggattactgggtcaaatgatatttcttgttctagatccttgaggaatcgccacactgtctttcacaatggttgaactaatttacactcccacgaacggtgtaaaagcattcctatttctccacatcctctctagcatctgttgtttcctgaccttataatgatcaccattctaactggcatgagatggtatctcactgtggttttgatttgcatttctctaatgaccaatgatgatgagctttttttcctatgtttgttgctcacataaatgtcttattttgagaagtatctgttcatctgcttcacccatttttgattggcttatttgttttttttcttgtatatttgtttaagtttcttgtagattctggatattagccttttgtcagatggatagattaaaacttgcaagctgaaactcgacgacttatgtaaacttctggataaatcatagcaacttatatataaacaacctttgtgcctgctgatgtgtggactacacaaaaggtacacatgaacactgtattcagactgcaattcagaaaaatgtgtcacattgccattgcaattggaagatgcttcagaaactctagaaaacctagtctatagggttagagtgatgtttgccaaacgaattgctctaattgaagcagctgttgtgtgactttaataaggttccaggattatactgtcccttttttgctgtgacttccctttgcccttttctgatttgtcttcatccccttttccatggggcatgacttcttaagaatgagccttcctagtgatgtaggatgagatgaaacatacagtcacaaagtcatgtcttctatgatgctttatctgaaagcttttgaagaattggggggccaggtgtgctggcagaggcctgtaatcccagcagtttgagactctaaggcaggaggatcacttgaaaccaggagtttaagaccagcctgagctacaaagggagaccacgtctctacaaaacataaaacaaatcaaattagccaggtgcagtggtgcatgcctatagtctcagatacttgggaggctaaggtgggaggactgcttcagcccaggagttcaaggctgcagtgagtacactccagtcttggtgacagagcaaggttgtgtctctaaaagaagaaaaaaaaaaaaaaaaaggaaaggaaaggaacggggtaaacaggaaagccaaagatctcgggcatctccagatgattccctgaacaaattgttttttcttggcttcaaaacctttcaagatgtatatttctttgtaaaagaaggacatgccaattgtaactttaagtgagcaatccaaatccagctcctaaaaccgaagtattttaactctcattctgataatatttattttctgaggcaaagaagaaagacaagattagatcaattgtttctctgcccactccatctcttccaacctgccttctcccctttaatcaaatgtataaatactaagcctcctgaaacctcttcagagaaaacacaaaccacagaggttttttgcaactcatgtattcccagggtgcactatcaggctctggctcaataaaactcaactggtcaagactcttgcctcagtcagtcattctggataaccaccaggagtcctgcaaagcccttcagtaatctattgcctgcctaggtgatgtgtacctagatgagtcatatcttcatgagccaaacacttgtcttccttttctgtctttcccaaccctaccactcagtgctgtgtgctctgatctgaccccagttcccaggttgtttgtataggtctaagaaagcaagaccaggaggggcaggttgagaaggaagtaagaggccaacagcagtggaaagtggcaggtagagctgtcattgctcaaagccacacacactgggtgcattgtatgaatttttctggattcaaaatcttttccctgtgtgtctatctagaaactcaccctcctcctactttcttctcattacattttctgtttctagtgcacttgtttatgtccagagaatggccatgcaaatagttgacaatagaataaacaatgacgttttgtgagacttggtagctggcctttgttttttccaaaagagattgaggtttctaaaagctagcttttatgcagggctgtgcagttgtgagtgtagttttatggaacaggtgcataagtgaagggtgagatagaaaacaaaatgctggctgtttgtcaaatcctgaaagtgaatgggacaaaaatcatttttgaagaaggatgtcattcaggagaccttgtaaatcttagagtgtcctcttatcagatgaagtggaggatgaggttgaattatggagttaggtgacagtgggtacatacttctctgcctcagttttttttttttttttaatctgtaaaaatggggattgtggtacttgggattttttggtgaggaccgtagttaactggaaagctctcaggatagtgcctggtacatagtgaatgctgcatcagtgtgagctattataattatgggaatagacaaaggtgccaccctggccatccagagtggggagatattttctggtcagagtccaggcaggccagctggagatgaagctgattagtggggacgcttaacttccaggagtggaagaatttaggaggagtaaacagaatgcacaacattctgtaaacattcctttacccaacagtaggaatactcagagtgggtgtgtcttccgtgacaatcattatctcctgggaatctaaaaatgtgtcctagagtcaaatggctttgatgtaagccaaacccagaaatgggcttcagggctgcctggcacatagcattcattcatcttgaaaaaggaaagcattcatcttgctaaaggaatccccttttctggcccaggccattatttttgttttagtactatcctaatttttaaggtataaggagaaagactgaagaataaaataataaagtacgtgtatgaaataacagggtagaattgagactggtacgtgtaagttaagagaaattgtgtataaattttgtgtgaacagaaaaaggatttcttgttgcaaacagacctctccatataaataatacctattgcctcgagtggatagcagaccgcatcacaagaacattccagcagagtcatgagagaatggttagtgtggcttctttaattggcaggttagactgagtaagttactgaagagaaaggagttgaaggagaagatgggtgcgggcaagaaaaatgggaaggtgaaaggaaaggactgaaaggaatgtttaccaagggctcatcaggtaccaggctctgtgactaatgtcttacacatgttaatttactcttccactgtcattttctgatgcagtaagagtcagccttacactgcagatgaggaaagaggctgagggaggtcaaatgagtggcacagggtcatccagccacttcatagcagagctagtgtgtttcactgtggtttgtgccgacagaaaagtgagacatggaaggaaggcaaaacatttttgttgtgggtgatgtttatgaaagtgacccttatgaggcagaataatggcctcttaaacatgtccacatccgggctggatgcaggggctcacgcctgtcatcccagcactttgggaggctgatacgggtggatcacgaggtcaggagttcgagaccagcctggccgacatggtgaaaccccgtttctactaaaaatgcaaaaattagctgggcgtgggggcgcatgcctgtaatgccagctacttgggaggctgaggcaggagaatcatttgaacctgggaggcggagattgcagtgagcctagattgtcccactgcactccagccagggcaacatgagtgaaactctgtctcaaaaaaaaaaaaaaaaaaaaaaatctacatcctaactcttggaacacatgcatttacttttcttggcaaaaacactgttcaaaggtgatgaagttgagtatcttgagaaggaaagcttattctggcttatctgggtggctcccagtttcatcataagggtccttgtaagtgaaagagcaaggcaggaggctcagggtgagaatgatgcagtctgagagactccactggccattgcttcctgtgaacatgtgtgataagacaaaattataactaatttagttatagatgtaattggcttttatttgtgatttatgatttggggcagctctccctctacagatgcctcagcatcccaagtagctgggactatattgcgggatctggcctgcagcctgcaatgcaatggggctctttctttgttctcaggcagatcggcaggttgagaaataaaagacacacacaagatagtgaaagctgggtccagaggggtcaccgccttctggtcctgcgatgctgccaatgcactggatataccagcatttattattaagtttagtgagagtgggggtaggttagtgagagatttagggccatttataggctctccacaagggtcgcattccattcccagagctatggacatctgcttttctgggataggaatcttggtaatgtgaaacctccctgactgcatgtccgttcataggctctctgcagggggaagcacatcacgtgctgttggctcattctggcagtccaacctggcatttgtctttacacaatcctgcatgcaatttcgtatttacaataatcaggagcatttcatcttttattccatagcaatagtttcagggggtctccctacatctcccccttttctccaatttaaatgaaccatagcaatcatagcttggcactgatcacgattggattgaagaatatttttttccaattttacacatgaacaataaaccaatagcacaaattatacacagaacaaaattaacgatagtggatcctcccaaagattttacctattgaatggggttgagattagataacccctcagagatactgtctaaaacttcagcactgggtaaagcagttaagtgtgcttgagaagcttcaaaaatctgttcttttagcttgcttaagtctaaacttaaattatcttcacttccttgtaaatggcattttactgattcccagttgtgaacagactcattatgttggaatggagttatacaaaaatcagaagtattccaatcaggttgcatttgtaatctatgttctaaactcataattctatctcccatccatgtaacagaagcacatcatgtgctgtaggctcattctggcagcccaacctggcattgtatttacacaatcctgcatgctcttttatatttacaataatcaggagcatttcatcatttgttctgtagcaatagtttcagggcttctccctacaggactacaggtgcgcgccaccatgcccggctaatttttgtatttttagtagagacagggtttcaccatattgaccaggctgatctcgaactcctgaccttgtgatctgcctgccttggcctcccaaagttctgggattacagatgtgagccactgtgcctcgccaataattaacacatttctttgagtttttgtaattccagcacaagagaaaccatttgatatttgaagaatggctgcacaccagtgaaaacatctgtagattgcaccacacgagggagactaccagtatgactatcaggaggaaaatatcaagagtttggaatatgcaccttaggcaagatgcaaaccaactacaataggatagatcaaagaagaagccagaagagtctagtcattttaactaggcagcacatttaatgatttttacaactgagtctgtaatacccaatgtatttatccatgtgcaacaagaagcgtcagaaactgcacaggctcccctctgttcagctgatagagagcaattctattatctagcattgcatgtctatgttaaattaaaacagggagcgagaataggcaagtatagaagtggaagcctaaaaaaaactccatacatttgaggaaaacattgtgttacagatgcagctaatgtcagcctttgggtggactaaaggatctcttggtatgtaaaaatgtgtgggccaggtgcggtggctcacgcctgtaatcccagcattttgggaggctgaggcatgtgggtcccctgaggtcgggagttcaagaccagcctgaccaacatggagaaaccccgtctctactgaaaatacaaaattagctgggtgtggtcatgcatgcctgtaatcccagctactcaggaggctgaagcaggagaatcacttgaacccaggaggtggaggttgcagtgacccaagaatgtgccattgcactccagcatgggcaacaagagcgaaactccatcttataaaataaaagtgtggttgacatgatatatctgacactgttaacttactctcagaagctacttcttgtgaaatcctaagtacagcattattctgggaagcaaaggcgacaggcataagcaaggacaaattaagagaggtaagattcccatcatgattgatagtcttgttctgacatcttgagaaaactgtccacagtgtaaagtcatcaacttgttgtcttggtttgcagtttgagtgtctctaagttatggtgttgaacatttggtgagttcttagcggcccacacctcagacatgagagttttctcatgaaatttacattgagttgtccatctccagcttatatggcttcaggaacagagccactcttgttcttaattatttcattggagaaaattgaattggaagaactaaaagaattcagggtccagtccagtctaccagtggattataaatactcaaagataatgaacagtggttcaatctggtaacaggtgtactacagttctgcttttcaacatagtttttctgtctataggagtctctatttttaccaaagataattccagtaggatgaatttgtttgcaaaataggttgagtctcaccgaacttgcccagactttttacctaagtgcggcaagagtagcaatggaccatagaggctctttttaaacttcgctttgctagaagtttttaataagaatctcagattaaacttccaaaaacctcttgagactaggaagccaaaccaagggcaacttcagactttgcctgcattccctatgggtttattctatgtatattctcaaatataacatcccagtcaaagccttggtaatataaccgatgttttcaaatgtgtcctgttataaagagagcagatccttactgaagttgtgcaaataactttattaccataaacatatgaatactcatgaatagtttcccaattctggggcactcagcaaaagcaaatgtttcaatttttgtttacaaaagtatactttaccaattgttcaaggaaaaaagttcataaatctggagaataaaacattcaaagactcagcacattttcaaatagaaaattatgaaaacattatccttttgattatttattccaataaaattgagttttttttcttctttgtcttgaatttcatgaaggtatcagcctgttcattaaaattttgaaagttcttagtccagtggtatgatcttgaagttatcaggagcttgtattccagagtccttgtcagagtcttttccataaatctccttgaagaaaaagcaattttggactgtagctgatggtaaatactttgaggaagaatcaaagcaactgtctgggaatgacaaagatttaaaatgactatggttaaaaatctaatgagaatttattatggtaaagacacagctcacatagaaatctagttacttctgtggcataagacactatgataacatatttgatttccagaaatttcatataatttttataatactcattaaaaaaattttttttgagatggagtgtcactctctcacccaggctggagtgcagtggtgcgatctcagttcactgcaagctccgcctcctgggtccatgccattctcctgcctcagcctcctgagtagctggggctacaggtgcctgccaccacacctggctaattttgtttttgcatttttagtagagatggggtttcaccgtgttagccaggatggtctcgatctcctgacctcgtgatctgcccacctcggcctctgaaattgctgggattacaggcgtgagacatcacgcccagcctagaatactcatattattaacattcccataaatattatttagagaaggtttagcatcaattatcccttatttgaaaatgctttctataaatttaatatataaaataaggtggattttccgttcagcttctgtttctcaagaggattactgagttgttggtgtagcccattcataaataggaccaaaaaagtatagtcttatgtatgttgaaaaaggtccttaggtaattccagtacttccagcagaaaatcattgatttagttttaagttctacctattacaataagagttctccatccttgttacatgttagtagtgtcagggaagacttaaaaattaccaatgcctgggtccgtctccagacctttaaactggaactaatgggtggggcttgagcatccacttttaaaaatgttttccagtgattccaatgtgtagctctatttcccatcagatttctctgatttcttgtggcattcaattttttctattttggtatcatgattattttcaggtctcatttcctgtcttaggctttatgtctcctggcgtagggaccttgccttcttcatttctgtatcttttttaaacacatgaactggtcatcaggaaaaggtctcaaccacacataggttgtgtcctgagtctcaggttcacatgttaatcctaaagtctttgttctccacgaggtcagatgttgcttgtgatgaagggtgtggttaagtctgcagtgcagatggtggaagggatttcactgtttttagacatagcattggaactaagaattttatgtctatatgggtgaaggggcagggatgtgtaggaagacagttctaattaggatgaaggaattatactaggaagtagaggtaaaggaagtgagaaggcttagtaaatagaagaaatgtgaacttatcaaagtggctagagtagaccactggagattcttgattaagtgaattaactagattttagaaaggtaatgaggcagtcatatgcaaggaagatttcaaagtctggagacaagaagtcaagcaatactttgagaagtggttgagctttatgggaattgagagaattacagtattgagagatgttaaaagtaacgaagagggtttcatcatgtgaaattgtgtttctcatttgaatctgagaaacaaatgagcagaggctggagataattatgtctaaaagacagtggggtacagggagcataaaggccagggagaaagggaactgtaggaattagtgctgagaagcaggagtttagtggaggaaggaggagatgcagtcccagatacaagcaaataagtcttttccctctcccaagcatggcagtcagccctgcaggaaccaggataagagaaaaggccatcatacctgccagtcttcctgaaatacagaaatgacatcaccgctgctctattggagtaaagaaaggaagacgtcctattcctggaggagctgtcatggaaagaaaagaaaagaaggaatgaagatgatgttattttacatgggggagcttgaggaacaggcatgtagcatgaggtactctataattgtttcttcaaggactacattatttctgttggaaaattgatgggagatgattatattcttgcagttttttttccctcttaccatacttctaggttggtgatcagtcctctgtcaattctctactgcactcagatattttggaaggctttcagatgtgagaaaggctgattgctattttctatgtcattagaacttgccacctttgcacctttccatggttgcatctttttctcagtgtctctgttatggcagtcacgaatgagaccctgccaggtctccatggcaggcacctgatttacagaaggcccagatcagtacatttcaaattcaccacctcctttgcacagaaagcttctttcctacaggctcccaggaagggtgtgaaagcaagcctagttctctgaggatctctttaactccaatgggtgactggttggaggattccccatcagccttgcaaaaactcttagaattgcattggtacctaaaacttatttctctttccttttcacaggaatcagccctggatagtggtctgtgggttctcccatactaccttcatgcctgccccacattccctcagaggtgtcttccctgataaattatcttgtatgtctaatcccatcttggatgcatctcaattggtaaaaactaacataccaggcttgattctttgcacttagctttttttctttctctcccacaagtagtcagtagccatgttctagtgttctatgtgttacctctttttccatatgtatggaaaaaggaaggtactgttgaggtgcacttcctatgtgccaggccctgtgctcaatactttacctgtatctcatttaagccacacaataaccctgtcaggtagacattatttccattttggcaatgaaaagacagaagcttagcgtggtgtaaaatctttcctggtgtcatatggctagtgacaggtggatctgagatttgattctaggactatttgacctcaaggctaatgataatggtagtaatatggtagctgacattggttcctctgtgtgtggcatcttgtttcattgactgtattaaacctttaaaagaattgtatgaagaaagtagcctcattgcagttttcaggtgaggaatcagaggttcagagaagttgagtcttgtgcaagaaatttataactgtaaactcttacattaaaaaagaagaaagagctcaggtcaacaacctactttaatacttcaggatatgaaagaagaacaaactaaacccaagcacagtgaatgagggaaataataaggattagagtggatataaataaaatggagaatggaaaaataatagaggaaattactgaaaccaaaagttgattcttcaaaataaaatcaacaaaattgacaaccattaactagattgactaagaaaaaaagagaaaagtttaaaattactaaaatcagaaatgaaaatggactctgagcatggtgggtcgtgttttaatcctagcactttgggaggtcacagcggaaggatttcttgagaccaagtgtttgggccagcatagttaaccctgggagatgctgtctctacaaaaaataaaaaaccaattagctgggcatggtgacatgcacctgtagtcctagcatcttgggaggctgaagaaggagaattgcttgagcccaggaggttgaggctgcagtgagccatagacacaccactgtattccatcctagggtggcctacagagtgagagcctgtccctctctcttcaaaaaaaaaaaaaaaaaaaaaaaaagaaaaatgaagcgattactaccaattctaataaaataatgattatgaaagtagtataaataattgtatgctaataaattggataacctatatgaagtagacaaactcttagaaacacacaaatatatgaatagaactataatcagtaataagattgaatcaataaaagtaattgatgaaattcagtattttttcataataaaaacattctaagaatggaaggaaaccacctcaacataaaggcaatatgtgaaaaacccaatgctaacatcatactcaatagagaaagactgaaagctttccctgtatgagcaggaagaagacaaggatgcctgcttttgacacttttattcaatataatattgaaaggtctagtcagaaaaattaggcaagaattttaaaaaagacattcaaattggaaggaaggagtaaaattatttctgtttacagataacttgaacttatatgtagaaaatcctaaagatggaacaaatctattaggactaataaataaattcagtaatgttgcacaatacaaaatcaacattcaaacatcagttgtatttcaatacactaaccatgaacaatctgaagggaaattaagaaaaaaaaattcaatttctattaacatcaaaaagaataaaatatttaggaataagtttaaccaaagaggtgaaatgattatacccgaaatctacaaaatattgctgaaagaaatgaaagaagacatcaataaattgaaagacattttgttttcatgaattggaagactcaatttggttaggaggacagtgctacccaaagtgagctgcagattcaatacaattcttatcagaatctcagtgacatttttgcagaaaaagaaaaatctgtcctaaaatttatattgcatctcatgactctaaatagacacacagctttgaagaggaagaatgaagctggaggactcacacttcctgatttcagcatttactacaaagccccagtaatcaatacagtgtggtactggcataaaggaggacatagaaattaatgaaatataataacctagaaagaaatgcttgcatatatggccaaatgattttcatcgagtgtgccaagatcgttcaatggggaagggacagtgttctcaccaaatgatattggaaaagctggatatccaagggcaagaagagtggaacctttacctaacaccatgtgcaaaaattaacccacaatacatgaaagatctaaatgtaagagcaaaaactatacaactcttagaagaaaaggtccatgatactggatttcacaatgatttcttggttgtaacaacaaaagcataggcaacaaataaaattgataaattggacttcacaaaaatcaaaaccttttgtatatcgaagaacattatcaggaaggtaaaaaggcaacccatgaaatgataaaaatatttgcaaattatatgtgtgataagaaattaatttccagaatacatgaaaagctacaagtcaacaacagcagacatccaaaaacccaattaaaaaatgaacaaaggattaaaatggagttttctccaaggaagatatacaaatatccaataagcccatgcaaagttcctcagcatcatgaatagttagagatatgcaaatcaaaaccacaatgttacaccacctcacacacttgatgggaatgggaaatgttatagccactgtaaaaagtggtgtggctgtttctcaaaaaattaaacaataaattaccatttgatccagcaattccacttctggacatactccacatagaattgaaagaaatttgaagaaatatttgtactctgatgttcagagaagcattactcacactagccaaaaaatggaaacaaccaaaaagtccattgaaagataagtgggtaggcaaatgaggtgtatctacaattaaaatgttattcaaccttaacaaggaataaaattccaatacatcgtgcaaaatggatgaaccttaaagatattatgctaactgaaataagccagacacaaaaggataattatcatataattccatttataaaagatagttagaatagccagttacatagagacagaatgtagaatgttgtgtgctaagggttatggggagaaggagtgagttactgttcattgggtacagaggtttaatatggtaagaggaaaaagttctggaaatggatagtgtgatggttacacaacactaaattgcacacttagaaatagttaatggtaagtcttatattagatatatataaagtgtttggtagtcttaccctctctataattacacactttttggcactgcccctttcctgcgatgcagagccccaggggtgaatctccctatttctccagctctgcatcagtcactatcctccgtgctgtgtcccacatgctgtgcccacagcctcatacagccggtgacttcagagccaggacgcagctcaggagtctgccctgaggctccctctcttcttatttccctgcagcctggcccgggggaggcttggcttcaactggcagctcgatttagccaaattcaggacaggccaccagggctctttctccacacatgctggtcccaccccaggtggagtcaggcagggccagtcaccagaggagcctggagcagagcaggaagcagagtctgagctgctcctccctcacccaaggggcttccccgtctcatttgggggaacagtgtgagcttgtttcaaagcctcagatgttccttgtagctcatggaagaggtacaagaaaacaaagacgtggcagaaggggatgtgttggtgacatcgagaagcaacttgatcttgaggactctccttctcatccgtctctgaagtctcttctaccacatagggctcagggctgataaagccccctccctaactttcttaggccagacacaaggtcagccatgagaaaacaaaaacaagaagagagtctgtagagacaaattgggagggttcaggaggagaatttgggatttgcttgtgcccatgggacacaggctgggaataaaaatgttttcctaactcttctctgaaagccagatagactccacctaaaaccctattgccaaggatgctgggatccacttaccagagacttcgactgtcatggatttggagctttccttgccagtggctgagttacgaacagagcaagcatagagccctctatgctttgtagtaatttgggggataaagagcttttgttctgattgctgaaacttcccattaattgtccaagagtactatgccggtgggttacattccgcgaagcaggacaagtaaaggttttgtcctgaacggtaataggtgaatgaagggtaaattctggggaggtctggaccatctggagcaaagagaataaagccacaggtgatgtcatccgagggaaggggatgctcctggtctcttaaagggacacagtgaccctctgagccaagacacaccttcaagtcccagccgaaccccctctatgttcactgagctgaagcctgaggtattcacctgtttctccccaatcacaagctatgggcaccaagtctcccatgacaagagcgtcccctccccttatattcttggttaaggctgtgcctacccaggatttcccagggcagggagtcatggccagctcggatgtccagaagtaaaggtgtctatacttggaccggagaaagactgagaggactggcttgtggtcatttagagttaagctggtgtcctggcccacagaggaacaaaagatactcacagaggacattcagggtgactgggttactgcggatgccaccatatcggtcccgtatttcacattgatagggtcctgtttcatttctcgtgacactgggtagaatgaggatcctgttttcaatgggtcactttaccctgggactgactgggaggctctgaccatttagccaccacgtgtaggtgtagttctcacttttagggtcacaggtgaagggtaagacatccttattctccctgggttttgagttgttgatggtgatgtagggcttgggcagcttcgctgtgtggataacagagagaagattgtcctgtgtgacacctttgattcctccacaggcatccctcaatcagagttggcatctcccacctgtcatcccacgcgagtccttgaaagccaatagctggtgcatgtgtcacaagacagatgtatgatgatctaagggctcaaagactgtgaggccgcctgctctgtcttagggaagcatagactttctcaagtgtcaattgagcagcagtgttgggtcatggacagacacatcagtaggagtcacagcccctggtacccctcccagtccctccctaatcagttgactggctggctcaccttgggttccttacctggaatatgcaactgctgggccccttccaaattccatcctactttgtccccctagacgtgatttctctgcagcttccatttccaaggacattctagagatgagtaataatgggacttcccattgtcctgaaaccctgaatatactgagcagcctggcctgggactggatgtttcagcaaaaataagacagcagagaccatagtcaagcctggaggtcagttcagtctacaggcagtggaggcaaaaggtggggcagttttttgcaggtgtttcatgatgacttacttgaaccagtgacctctaaagatagagcagagtgcaaggaatgatctagaaagagtgaaggggacaggcaagagctggaggctttggagcagaaccatgttgcctgtcctgcgttcaagtttcctctccttctgcagagggcaggtgaggaccatgtggatctttccagaaatacatgtggacatttgcatatgcagaactgattggtggaaagggtgggaatgaactgctggaaatctggtcctcatggaccatgtgtgtttgatggatatgatacaaatttagagagaagttttgcaaatattttatttcattggacattctactctctgattccatgggttcgactactctagggacctcatgtaagtggattccagagtgaatatgagaagagactgctggtttccaggagctgggagtggggagaatcagaaattgttcatgggtgtgcagtttcagttatgcaaggtggggaggttatagagattggctgtcgagcttgatacctatagttcacacagattgagtatttcttatgcataagacttaggacaaaaagtgttttggatttctgacattttttgattctgaaatatttgtcatatacttactggtttagcatcccaaatctgaaagattcaaaatctaaaatgctccagtgagcatttcttttcagcatcagattagtaggcaaaagtgggaggtgataagccaaagatattcttgccctttttttttctctcaccacatttctagcttggtgattagtttttggtcaattccatactggccatgctgcactcgtatgtttttgaaggttttgggatgtgagaaagcctgattgctattttctgtgtcatcagaactttccaccttttcatggctgcatcatctttttctcagtgtttgtgttgtggcagtgattaataacagcctgtcaggtcagatttaggacagagttttctgattctgcaaaaaattttactgcgattctgctaggggttgcattgaatctgcaactcactttgggtagtattgtctttctaacaatattgactcttccaatccatgaaaatgaaatgtctttccatatattgatattgcatttaatttctttcagcaatgttttgtagtcttcagtgtataatcatttgacctttttggttaaacttattccaaaatagtttattccttttgatgttaatgtgaattgaaattcttttcttaatttcccttcagatagttcattgttagtgtatagtgtaaagaatgatctagaaagagtgaaagggacaggaaaagctggtggttttggagcagaaacatattccctgtcctgggtttttgattttccctctccctttgcagagggcaggtggctcttccctgatagctagatagacttcactggaaaacatattgccagtcctccagggatccactcaccagggactatgatcctcttgattatgagatttgttccaccaatggctgagttatggatgaaacagacatagacccctctatatgttttggtgatttggggtataaataacacttgtgctgattgctggaacttcccatcaatcagccaagaatgctctgctagtgggtgagagtctgtgaggcaggagagcttggggacttcccttgtatggtaataggtgtatgaggaagaaatggtgggggcatccaggccatctggagcaaagagaataaggtcacaggtgatattgtcagagggaagggaaaatcctggtctgtggaagggccacagttgccccgtgagccaagtcgcaacactgaagtcccaagaaaatccctgctgtgttcactgatctggagagtgagacattcacctgtttctcccatcacaagctctggaccatgagtctcccatgacaggagcagcctcttttctcctattgtggatcaagcctaggcctactcttgttttcctggggcagaaagtcatggccagttttgatgtccagggataaaggtctctgtacttggacctgagagggactgagaggcctggcctctggccatgtgtatttgggatggcagcgtggctcacagaggaacagaagatagtcacggaggagattcagggtgaatgggtcactgcggctggcactcactgggttccgtatttcacattcatagggtcctgcagtatactttgtggcaccaaatataaagagggtcctgttggttttggacagctgcaacctttgagtggtagggaggttctgaccattcatccaccacaggtagcttgcgttcggagttgcaggatcacagattaagatcacagcctccatgatctccctggggtttaatttgctgctggagatggagggcttgggagtctccactgtgcagaaaacagggagaagattgccctgtgtggcacctttgattcctccaaaggcatttttcaatcagagttggcatttccaacctctcagcccacccgagtccttaaaagcccatggcaggtgtgtgtgttacaagacagatgcatggcaatctgagggctcagagattgtgaggctgcctgcttcatgtgggagaagcacagactttctcaagtgtgaattgagcagcagcattgggtcatggaaagacacaggaccagcagtcacagcccctggtgcctctctgagtccctccatctccaactgcctgcctggcccaccttttggtcctcacttggagcatgcagtgctggaatcttcttagcttcagtcttactttgcccccgaggcatgttttctctgcagcttccctttccaaggacatcctagagatggatgatggaacttcccattgtccttaaaccctttgggtactggaaagcctggcctgggactgggtacttcagcagaaataacacaggggagaccagagtcaagcctggaggtcagttcagtcatcaggcagtggagccacaaggtggggcagttttcccagatgtctcatagtgactgacttgagccagtgacctctaaagatagagcagagtccaaggaatgacctacaaagagtgaaggggacaggcaagagctgatagctttggacgaagaccacgttccctgttctgggtccatgatgctcccttccccctgtagagggcaggtgaggaccatgtggatctttctggaaatacatgtggatgtttgcaaatgcagaactgactggtggaaagggcaaacatgaactgatgatggaagtctggccctcatggaccatatgtgtttggtggatattagaccaatatttgggaagaagtcttgcagatactttctctcattagacattctactctctgattctgagtttgactactctatgtacctgatatcagtggattccagagtgaatcagagagtagaatagtagtttgcaggagctgggatcaggggaatagggcgttgttccgtgggtgtgcggtttcagttatgcaggatgaggaggttctagagatctcctgtgcagcctcgtgcctatacttcatgcagatacagtgctccttatgcagaaagcttaaaacaaagtgttttggatgtctaattatttttttattttggaatatttgcagtacatgtactggtttagcatcccaaatctgaaaaatttaaaatccacaatgcgccagtgagcacttctttttagcatcacatcagtggtcagaagtgttgagttttgagcatttcagattgtggatttctggatttcagatgctcaatttgtaatactgtaattttcccataaaaagttttcaggactttagacctcatgttatgttctgactctagtaacaaaaaaaaatttggaggaaacattgaaatgttttcataagtgggaatttttactgatggtccaaacatctgagatcaattgctggtagtagtatttctcttgaggccaacataaggtttaggtgtgccatgaattccagcaggatcacattatgctcaaagaaagatgccaaaggtgatttgaaattagcaactccttaagtagagagagtcccgttaaaaggacaaaactgggtagtgtgtcaattacataaagggaggaatgatgccaaattaaaagaagtgatgtgtgttatgttagtaaatatagaaagaactccctgcttctgctttctgtgccgagttaggaaaaatcgggaggagcacaaagcaggtatgtgaaatactttcttcgttctctcttaagttcaggaaataacactagagtttaagtttgtgtgaattaggaagagtctaagtgagatgccaatggctcgtgtgtctccccacaggaagaactcgaacttatgaaagcagcatcatcatgaggaaacagttgtatgtggcacaggcagtaataccatcagatagcacccacctggccacctccagctggtccccaaaaccaccagtattcccattacatgtaggttacagcctttgtagttgtcccacaacaaagaaatttaaaaattgctattgtcaaaacaaaatattaaatatgaaggcgaatatgttgttccactttttttccccactctttttgacctttcttgtttcagttttggaagtttctattgacacatcctcaagctagggattctttcctcagctctgtgcagtctaccagtaagcatcaaaagcattcttcatttctctaacagcattttttattttctgagacagagtctcactctgtcaccccggctggagtgcagtggcatgatctcagctcactgcaagttccgcctcgcgggttcatgccattctcctgcctcaacctcccaagtagctggcactacaggtgcccaccaccaagcccagctaattttttgtatttttagtagagacggggtttcaccatgttagccaggatggtctctatctcgtgaacttgtgcccgccttggcctcccaaagtgctgggattataggcatgagccactgtgcccagccatctctgaaggattttaacgagttgttgacttttgagtttgttcagtttttacttagcgttagaaccgagtgacaaatttcaagcttgttatatgcctgacaggaagccagaagtctctaggaagtgactggagaatgtgagctccacagcaggttgaggatggagtcacgagtgaaatgagcccatgggctttggggactgcaggcctgtccagcctctgacaccctggtgagtcagagcaaagattacaacagtgacaggaaactagcgtggctgactccatctggcatctagtctcaggctggctgtcctcactcattcctgggcataggccaggctaacattgggaggaatttagtttatggtttaactttgaaacaagaaagataatagtacctccataaaactaacacccttactttgcccaggggctgcctttctaaaactagtgaaagaccatgagattgagattataggagggaaccgaattctgctacaatgtaggcacagtttctataatccctgactgatcaaatgtcatttggccagagtttacaaaatttgtaactaattgctcccatagataacatcactattgcagaacgtgagattagtcttttgagatgtttttcattcttttgcattctggcaactggctgacctcatccatacccatgactaatggctcagccagccatgtggtccctacctagaagtggattcaagcacaaacagttcatttccctccgcccgcatgattccatcaccaaacaatcagcagtactcattttttagtcctgtgtccctgaaatcatccttggaaatgtctaacacctgatccactggggaggctgatttgagtaataataaacctctgtcctcctgtttggcagacttggagtcattaaaatctttctttactacaaaccaccatttcaataattttttttttgtgtgtgtgtttgtgtctgtgtgtgcagaaggccagaagaacttgtctggcaatgataacagtggatggagaactgcctatccctgtcccatggtcttgtccacaggtcagcctcacaaagggaaagagccctagatgggaatacattggaagctcattctcttagtgacctggggacattggctggagataaagcccggcaggagtggcaactccaggtgatttctacacctttcctatttcctgggaggtgggccaggccacagtgttagcaggaagggaacagaactgccagactaattagagggagtgtctggggaaggcctaggtgtggaggaagaagctgtgcaggacagggcttgccagtcagaatgaagtgggaggaagatgagggacacagagaagcagagagaggcagagacaccatggcagtgagcagtgagggagacactgacttcagagaccccaggtaccaggtgcccccatttcctcagtccaggaccaaggagccctgagaaccctccggtggccaaagagcttcagagttgcatgaggtggggtggctttaggggcaagaggtagtagggggatgaaacatgggtgtcagcctctgaaggacaagggacaggtgtggctaggacctcctaggattctgcatccaagatccagtctctaaagaggttttggatcattcatttcttcatttgattccttcatttgttatgtgagagctcctgagtatgtgtctctggctgggcctgtgctggtgcagggtgtgagtggggaaagaaaacaaggtcctctccttgatcctctcatgacagtaacatggacactttgggaaacacaggatttcaggttcagtgatgggggttaagatctgagggggaggcctggacattttttttgcactgactctgatggttgaggcaggtgatttagttctggagtacagactaatcagctgaccatttgctctcactcctctgaggtttggatgcctaagaagagaggatttgagccaataaatgactatggggtgcttgaaacccagtaagccctcacttctggtggaggagaggatgggcctgtggctgcagacagacctcatgtgaccctgatctcccctttgggtttgtgtgactctggttcaaagactgtgccttcctgtgcctctgttttctctcaatcaaataagttaactggcaaatggactgtggcttttcatgctatctgtgaataaatgttaaagtattcacagtcacctgacttaatgcttggcacagtggaggtgttcacacaaacagcatttattattaatttgcttccatgagaaagcacatttatgtcagatccctgtggacaagctgctaccagttacaccttctctcttctgtttctgcttccgggaacattagactttctatggactgtcctgagcctcccaaggcagttggctgatggcctacaaagcttgtctttctgtcctctccactctgaatgtcaggtgaagaaagctctgtccttgcccagatgaggctctgagggctgagccctagctggtgaacagctgcaggagacacagtcctcagacagctggaaaacccttggtcccagtaagccctgcccaagaagccacaacccagccccagtacaggctccttagatttatctgcagcaaggatttagggacaagggtctggggttgaggcttctagggctgagcttctctgagagtatctcaggtggcctctcaggccaagccctactcagttatccagggtctttctcagggtcaaatttatgaagagggcatgaggtgcctggctgagactgatctcctcctgctgagtccccccatcagactgtccttcctctgcagcgagtgtctgcagggtctggatgtgggaaaggaattctgatctgttgaaatttgtctcctctgtgtgtgtcctgcactaaatgcccaaactccagcatgggacataatgcagagggggacacaggcacagtccaggcctgacaatcctgtgtgtgtgaagtagaagtgacccctgtcccccaacacccagggatcatgtggaatcacttacggtataaggtgaaggtgaaatttccagttactcctctagtcccatcacctcgctgtatgatgtgtaaggtgtaggatactccgtcctcccgggtgacattctggatcagcagggatgcattggaatatactgtttctcgtccactgtatgcaggcccatatgtaattctttgaccgtctactacatatgatgtaatgtaatggtagaggtcccttatttgccctttctaccacatgtaaccagtaagattctggggcaaattgtggacaagtagaagaacatccttcccctcggaaactttgggtggctgggcttcagtcgtgacttgggcaatggtaggtgggttccagaagtttaaaagtgatgctaggaggtggagagagcatcagtcaatattgagacctgtgtattggtgtgaaaacatggggccctgggtcctgagaaggtctcttcagtcctcagccttgacaacacagacacacacacacatacaaacacacacacacacacacaaaagcggcatgtgtgattgtgtgtgtgtatgtgtgtgtgtcctactgtcctactaggtcaaggtcagcagcatgacgcccattccttcaacacttctgaccttggcatttttctgtttggaatcctcttccccaggggtccgcatggccccctccacactgccctcaggtcctgcttacatcagggcatcgttagacttctttcctgatgcctgcttcagagaccctgggtcttccctttctgacctttccctgctctgctccctccagggttcttgtcaacacctgacctcacattctagatctctttgcatgtctgtcttcccccccatgacagcgtgagctccgtgaggacagggacttttgtgatcttggttgcaccccagtgcctggaacaggctgcagactcctgtagatgtgagagttctcagggccctccatgccctgggtgttttttttctcccaattgttgaggttttttgctgaggacagcatttcatgtcctgcttatatttttatttgaagtgtcatctgatatagttattattatcatttttcaaaatgtgctggcctctgatgattaatcaggaaaacagaacacttaagattttcctacctcttaccaattccggttcaatgtgactttcctattttgacccctgtccctctctggtgtattttcccctatccaggcatcaacagagcgttctttccttttttttttctttttttctttttttttttttttgtgacggattctcgtactgtcgcccgggctggcattcagtggcactatctcggctagctgcaacttctgcctcccgggttcaggtgattctcctgcctcagcctcccgagtggctaggattacaggagcacaccaccatacctggttaaatttttgtatttttagcagagacagggcttcactgtgttggccagactgatcgtgaactcctgatctcctgatccactcgcctcagcctcccaaagtgctggcttctttcattttttagaaccccatcctctccaggagaccccatccagtcactctgcttcctcctcctgtcctctcccaggaagttctctcctcacctgtgagcaggacccccttccatttgatgtgctgtgtgcagggaggggctgagaggggccccatggtctctgctgcttgtgtgttctcctctgtggagatgagcctaggttccagaaacttcctgagcacggctgtaggctgtgctgtccttcctccttctgcgctgagcctcttcctggggcaggagcacttctcaggctcatgggtggggttaggcccaggacacctctctgtcccctcctctctacatcctgcctccttgtccctccttctgtttttccttttgtctgtgtttcaggtccctgggaattgtggaggcctctgcctttttcagcagtgattctttcaccaaacctcaacacacactttgtgcagacacaaacacacacagacacacacccccccccccacacacacacagaagagacacacacagacccacagtcacacacataccctgcaggttgggcaagcagagtcctgggcctcagcctccaggtgtccccatgggtcttggttgcggtgcacattcatgccctttgccctctttcatccccatctggctctcccttgcagtgcaggaggctggagctgcaccaggtccctgtcacagtgatgccccattgtgctgtgtgtgagctgtgtgttgcctggtgagaaggacccttcctttctctaatcgtgtctagcttggctgcagcttccaaggatggacattgaggacctgggtgtcacagaggaaagtgtcctacctggaggtgtgcagggtgaatctctcatgcctcttgggaggagaggcctgtgctggttgctctttgggggctgtgattcccatagtcaaagggacagttcttggtcagtctatggctccctcgggtctggcggctgagctgaagctcaggatttctcatgttcttcctgaccatctttgatgtcctctcttctctgcccagctgattgtcctgtggtcaccacaccttccccctggtggtgcaggaggaagtggggagtcacccaggaaccccgtgggacatggctcattgagacgcaggagggggagcctgggacagggcaggggttagaggtggagagattcatcccaacttactccgtggccatgatgggctcagccctccatgtgctgacatacccaggggtctatcctgagggttttgacctggtcaagctgctctctgtagaggaggaagaggcagtggccagagagcctgtctggagggaccttgctcacacctgagagggtgtgtgggggtgagttgtgttctgggatcaaagagcaataacaccccccttctcccagcaagcacacaggagaggtctgtcttcccaagggacagctgggggtaggtggccacatcccggatggtgcctgtgtgtgaccatcacacgcactctgagcaccccggggtgcagcgggcaggcaggtcacagggtgcctgactgattcccggggaggctgtgggtcctcaggcagccgctgttctgtgtcggcgctaggcttggcctgggatgccccagagaagaggacagatggagcaggggcgggtatttagagagcagtgacagaaagagttgatgaggatggagggaggccacgaggggaaagcaccccgtgtagcgtcgcgtgcaccagtgctgccctgggagatgcctttagctgggcccagggaaggagcaggtgtgtggggaggagctacctgtagggggagtggtgttaggttggtggccaccaggtcagggaggagctgacagagtccgtgtggggagcatggagagagctgaggacttaggccgaagtgaccctgatgagggtggatcctgctgggctgtgggttccgctgagggaggttggcatcccctaggaaggctccagggtgggagggactctgtcgccctctggtggacagggagggaagtgtgaacggcagcaatcccaggccaggctgcatgttttattccacatggatctgcacacttcacactaggtcacacatatgttatgttacagctccatcacccttccagccccgtgagtcccagtctctgtggctctatgttcactgttctccctttcacaatcagatgtcccaaacgcagatttttgtcactttctgtgagttcgtgtttgtatgcagtaggcggcactgtatataccctgggggcagtgatgtctagggctgagcagtgcacgtgggcttgggaggagaagagggagcagcagagtgggaatatcaatgtcagagggacagggacaagtcactttcattttctcactcccagggaccagaacccaggattctgactccagggcacagtaccacaccttgctggtgtccctggatgtcatgatgctcatagtgtcatgttgccttggcattcattttttaaggtgtaagtttatttgcctcaaatcagaggcagggcttggtcaccatggcagttttcaatactgtatctggttcaagtggctccagttggtgtccagagatcaaatcttagaggcatctctcctgcttggtgtgctgggctctcctctctccagctgctttctttaaactgataattctgacattcaccctcacatttaaagtgaccacctctcagtcacagcatgagctcctggtcccagtgtttgctgcttgctttgaacacatccattaaagctccctgctggaaatctgtcagataacaccctggacttaataaaggcattggcttaccggtctcttctctcctccctgcctgggctcactgacctctgtgtctgtggtctccaggtgtgccaagtgctccccagtgtctgtaagtagtaaaaatacttacactttcacgttgtggttgtattgctgtggcctcacatgccatccagggcctgacattgacgctgccttgtgggacctgtgctggctgagcccctgctggagctgttgttttatggtctctggttctgctggggacaggagcttccagctaacttgattgaaaaactgatgcctttcattgaaaacactgggtcagatgatgtattcatgggcttcagctgccataacaaacaccttagcctgggtgaattaaataatagaaatctatttttcacagttctgtgaataatgtgctattctaaccactttaaaatccacaatcaagtgaaattaaccacacacacagtgttaaattaccatcaccactattttccctagaaaatttttatcattttaaactgaaagtttgtatcttttaaacaataactccctgtatgttccaccctagaccttgatcatctctactctgtctctatgaatttgcctattcttgatgtttcatataaatggaattatacaattatgttatttcatttctgacatatttcacttagcataatgtttccaaagtccatgcatgttccagcgggtgtcagagcttccttcctctttatggcagattatcattctgttgtatgtgtcaccatatttgtttattcatgtgttgatgaacacttggattgttttcatattttatcttttctgaataatgctgcaatgaacattcccatgcaagtacctgtttgagtccgtactttgggtatatacctaggaatggatgttgtttcaaatgagaatactatgattagcttttgtttttgttattattatactttaagttttagggtacatgtgcacaatgtgcaggtttgttatatatgtatacatgtgccatgctggtgtgctgcacccactgactcatcatttagcattaggtatatctcctaaagttatccgtcccccctcccctcaccccacaacagtccccagagtgtgatgttccccttcctgtgttcgtgtgttctcattgttcagttcccacctgtgagtgagaatatgcggtgtttggtttttttgttcttgcaatagtttactgagaatgatgatttccaatttcatccatgtccctacaaaggacatgaactcatcattttttatggctgcatagtattccatggtgtatatgtgccacattttcttaatccagtctatcattgttggacatttgggttggttccaagtctttgctattgtgaagtatgatattggctgtgggtttgtcatagatagctcttattattttgagatatgtcccatcaatacctaatttattgagagtttttagcatgaagcattgttgaattttgtcaaaggcctcttctgcatctattgagataatcatgtggtttttgtctttggttcttatgctggattacatttattgatttgcgtatgttgaaccagccttgcatcccagggttgaagcccacttgatcatggtggataagctttttgatgtgctgctggattctgtttgccagtattttattgaggatttttgcgtcaatgttgataaaggatattggtctaaaattctcttttttggttgtgtctctgcccggctttggtatcaggatgatgctggcctcataaaatgagttagggaggattccctctttttctattgattggaatagtttcagaaggaatggtaccagctcctccttgtacctctggtagaattcggctgtgaatccatctggtcctggactctttttggttggtaagctattgattattgccacaatttcagatcctgttattggtctattcagagattcaacttcttcctggtttagtcttgggagggtgtatgtgtcaaggaatttatccatttcttctacattttctagtttatttgcatagaagtgcttttagtattctctgatggcagtttgtatttctgtgggatcggtggtgatatcccctttatcattttttattgtgtctatttgattcttctctcttttcttctttattagtcttgctagtggtctatcaattttgttgatcctttcaaaaaaccagctcctggattcattaattttttgaagggttttttgtgtctctatttccttcagttctgctctgattttagttatttcttgccttctgctagcttttgaatgtgtttgctcttgcttttctagttcttttaattgtgaagttagggtgtcaattttggatctttcctgctttctcttgtgggcatttcgtgctataaatttccctctgcacactgctttgaatgcatcccagagattctggtatgttgtgtctttgttctcattggtttcaaagaacatctttatttctgccttcattttgttatctacccagtagtcattcaggagcaggttgttcagtttccatgtagttgacctgttttaagtgagattcttaatcctgagttctagtttgattgcactgtggtctgagagacagtttgttataatttctgttcttttacatttgctgaggagagctttacttccaagtatgtggtcaattttgtaataggtgtggtgtggtgctgaaaaaaatgtagattctgttgatttgggttggagagttctgtagatgtctattaggtccacttggtgcagagctgagttcaattcctgggtatccttcttaactttctgtctcgttgatctgtctaatgttgacaatggggtgttaaagtctcccattattattgtgtgggagtctaagtctctttgtaggtcactcaggacttgctttatgaatctgggtgctcctgtattgggtgcatatatgtttaggatagttagctcttcttgttgaattgatccctttaccattatgtaatggccttctttgtctcttttgatctttgttggtttaaagtctgttttattagagactaggattgcaacccctgccttttcttttttccatttgcttggtagatcttcctccatccttttattttgagcctatgtgtgtctctgcacatgggatgggtttcctgaatacagcacactgatgggtcttgactctttatccaatttgccagtctgtgtcttttaattggagcatttagtccatttaaatttaaagttaatattgttatgtgtgaactttatcctgtcattatgatgttagctggttattttgctcattggttgatgcagtttcttcctagccttgatggtctttacaatttggcatgattttgcagtggctggtaccagttgttcctttccatgtttatcgcttccttcaggagctctttttgggcaggcctggtggtgacaaaatctctcagcatttgcttgtctgtaaagtattttatttctccttcacttatgaagcttaatttggctggatatgaaattctgggttgaaaattcttttctttaagaatgttgaatattggcccccactctcctctggcttgtagggtttctgctgagagatccgctgttagtctgatggggttccctttgtgggtaagtcgacctttctctctgcttcccttaacattttttccttcatttcaactttggtgaatctgacaattatgtgtcttggatttgctcttcttgaggagtatctttgtggcgttctctgtatttcctgaatctgaatgttggcctgccttgctagattggggaagttctcctggataatatcctgcagagtgttttccaacttggttccattctccccgtcactttcaggtacaccaatcagacgtagatttggtcttttcacatagtcccatatttcttggaggctttgttcatttctttttattcttttttctctaaacttcccttctcgcttcatttcattcatttcatcttccatcactgatacccttcttccagttgatcgcatcggctcctgaggcttctgcattcttcacgtagttctcgagtcttggctttcagctccatcagctccttcaagcacttctctgtattggttattctagttataccttcatctaaatttttttcaaagtttttaacttctttgcctttggtttgaatttcctcctggagctcagagtagtttgaacatctgaagccttcttctctcaacttatgaaagtcattctccatccagctttgttccattgctggtgaggaactgcgttccttttgaggaggagaggcgctctgctttttatagtttcgttttactgctctgttttttccccatctttgtggttttatctacttttcgtctttgatgatggtgatgtacagatgggtttttggtgtggatgtcctctctgtttgttagttttccttctaagagacaggaccttcagctgaaggtctgttggagtttactagaggtccactccagaccctgtttgtgtgggtaccagcagcggtggctgcagaacagcggatttttgtgaactgcgaatgctgctgtctgatcgttcctctggaagttttgtctcagaggagtacccggccatgtgaggtgtcagtcttcccctagtggggggtgcctcccagttaggctgctcgggggtcaggcatcatgaacccacttgaggaggcagtctgcccattttcagatctccagctgcatgctgggagaaccactgctctgttcaaagctgtcagacagggacatttaagtctgcagaggttactgctgtctttttgtttgtctgtgcctggcccacagaggtggagcctacagaggcaggcaggcctctttgagctgtggtgggctccacccagtttgagcttcctggctgctttgtttacctaagcaagcgttggcaatggcgggagcccctccccgagcctcactgccaccttgcagtttgatctcagactgctgtgctaggaatcagcgagactctgtgggcataggaccctctgagccatgttcgggatataatctcctggtgcgcctttttttatgcctatttcaaaagcacagtattaggatgggagtgacccgattttccaggtgccatctgtcacccctttctttgactagaaaagggaactccctgacctcttgtgcttcccgagtgaggcaatgccttgccctgctttggctcatgcacagtgcactgcacccactgtcctgtgcccactgtccagcagtcgctagtgagatgaacctggtacctcagatggaaatgcagaaatcacccgtcttctgcatcgctcacgctgggagctgtagaccagagctgttcctattcggccatcttggctccaggaccctatgattagctttttgaggaagagcaaaactgtttctcctagtggctgtacttttttatattctcaccagcaatgtatgaggattccaaattctacataatgctgccacttgttatttaacattttaaaagaattgtagccagttttgtaggtgtggtgtggtatctcattgcagctttgactttgtattttcctaatgactaatgatgttgagtatcttttcatgtccttcttgactatttgtatatcttctttgaagaaacatctatttgagtcttttgtccatttataaattggatggtttctccctttgttattgagttgtagctagttcttgatattatctggacatgaaaactgcctatatgtggtttgcaaatattttctctcattctgtgtctattaattattttcttgatgatttcctttgatgcacaaaaggctcacatcttgataaagcccaatttatcttttttttctcatgcttttgtatcatagctaagaatccattgcacatttgaggtcatcaatatttacctctatgtctattttaagatgtttttatggttataggtcttatatttaactcactgatcaattttttagagaattgtttgatatggtgggaggtagagttatctaaattcactgttttgcatgtggttatctagttgtttctgcattatcattagaaaggagaattgttcctccattaaattgtcttgacacactcttcaaagagtaattgaccataagtgtgagggtttatttctaggctctcagttctatcccatttgtctttatgtccattcttttgccagcagcttatgtctattctttgccagtagcttctgttttaataattgtactcctttgtgagatttcaaataagaaagttcaagtcctacaatttattttggcaagattgttttggctattcaggggtccttttttgaaaggtggggaggccaatatttcacaactgggaaagccgtttctgtcttcttcagggggaaatttgggagaacattttaagaaactttatctaagtaggtaaactgttaccactttatttgctgaagtgctacgttaaagtgtgcattgcctcttgtggaagaattatgagaccctggaagcactagcccacatggtaagagacagtgaattccacaatgaggggcagagaggatgttgttttgggatacaatgttgttgggggagtggtatacatctctacttctttatgtctctgtatagttggtgtagggaccagccacacaaggtcagtgggtttttctccctgtgtgtggagatgagagattgtagaaataaagacagaagacagagataaaagaaaagacagctgggcctgtgggaccactaccaccaagacacagagaccggtagtggcaccgaatgccaggctgcactgacatttattggatacaagacaaaggggcaggataaggagtgtgagccatctccaatgataggtaaggccacaggggtcacatgtccactggacagggggcccttccctgcctggcaaccaaggcagagtgagagaagagaaagagagagagagcttacagcattatttctgcttattagagacttttagtactttcactaatttgcttctgctaactaaatggcagagccaggtgaacaggttggaacatgaaggtggactaggattgtgaccactgaagcacagcatcatagggagacagtcaggcctccaaataactgcaggtggacctgactaatgtcaggccctctacaagaggtggaggagtagagtcttctctaaatttccccagggaaagggagactctaagtagctttcctggtctgctaagtagcaggtgtttttccttgacactgaggctactgctagaccagggtccgcttggcaatgggcatcttcccagacgctgtcattaccgctagaccaaggagccctctagttgccctgtctgggcataacagaaggctcacactcttgtcttctggtcacttctcactatgtctcctgagctcatgtctctgtatggcctggcttttcctaggttatgattatagaaatgaggattattataatattggaataaagagtaattgctaccaagtaatgattaatgatattcatatataatcatatctaagatctatatctggtataactattcttcttttatattttattataccggaagagcttgtgccctcggtctcttgccttggcacctgggtggcttgccacccacaagtgggcatctccgttggacacagtaggttttgaaatccttgtttatcctctggggtctgggtcttggcttacctgttagctgcagctgaaagaggtgtctgctaaggcattgccacctgtggtgagaagaagggttcagcagagtgaaagtagctggggctcagagaaaccaggaaagtctgactcttagaaactatgggtcagcagatgggtgtcctcaggggtaaatgggccatgccagtagacattgcagtggactggaagaaggtaagggatgccaggtatcccatgttctgtctcagctctgcagctgaagatttgggccatgggcttgtacggccctgcagcaggggaagggtatagaggaatggctgcatatcaggaccaagtccatgtcatcttcttaggcattgttaccacagatggaggattctgttcagagactggcctggacacatgggagggcccaccccattcttttaaaattattttaagagaacagtattagcaaaggtggtacatgttttattctgctagaatgtcttactgtcacgttttacaatgtatctcttaggaaacggcaagagccatccacacaatgtggatttaaaggggactctattataatttcagctttcctacgtcttcatacaaaccatcttctctgcaaacacacaggcaatatctctgtgttcatttctattgggagccctgtatgcaaggtggagagagccacatttccccctgagatgttatgtaaaagtttgaggttgagatgacatatctgacactctgttgttactctcagaagctactacatgtgaaattctaatgactgcattatcctgccaagtgaaagaggcaggcatgagcaaggacagttaagaggggggagagcctcatcatgatggggagtcttgttctgacatcttgggaaaaactgtccacagtgtgaagtcatccacttgttgtcctggtttacagtttgagcatctgttgttatggtgtcgaatattttggtgagttctgagtggctcatgcttcacgtacaagggttttcccatgaaatttacattgagttgtccacctccagcttatagggcttctggaacagagtgggtcttgctcttagtgattccatgggagaaaatggaattggaggtactagtagaattcagggaactgtccagtctacaggtggataataaaaacacagaaacaatgaacagagctgcagtctcataacaggtatactacagtttttattttccacataatttttccctctatgggcatctctacttttaccaatgataatttcagtagaataagtttgtttgcaaaataggtggagtttcttcaaatgtggtctgattgtttacataagtgcagcaagagtagcaatggaccatgtaggctgtcttctaaaattttcttttctctaagtttttataaggaatctgagattaaatcttcacaaacctcttgagaataggaagccaaaccaaggctgacttcagactttgcctgcagttcatattggttcattctatctatgtttttaatataacatccgaatcaaagcattggtaatataaccaatgatttcaaatgtgtcatgttacaaagaaagcagattgttactgtacttgtgcaaatatgtgtattaccataaacatatcaattctcatgaatagttgcccaattctggggcagtcaggtagaaagcaaaagtaaatgtttcaattacggttcccagaagtatagtttattgaactgctataagctgtagatagattaaaagagaaaaattccatcaatgtagaaaacaaaccatttaaagaatcagcaaattttcaaataaaaatcataaaaacattatcttcattattatcaattatttcaatgaaatcaatgttcttcctgcttggtctaggctgggaatattatgaagatatcagcctgtttgttaaagttttcgaagttcttagacaaatttggagggttcaggaggagaatttgggatttgcttgtgcccatgggacacaggctgggaatacaattgttttcctgactcttctctgaatgccagatagactccacctaaaaccctattgccaacgatgctgggatccacttaccagagacttcgactgtcatggatttggagctttccttgccagtggctgagttacgaacagagcaaacatagagcccgctatgctttgtagtaatatggcggataaagagcttttgtcctggtagctgaaacttttcattaattgtccaagaatactgtgccggtgggttagagtccgcagaacaggacaagtagaggacttctcctgaacggtaataggtgaatgaagggtaaattctggggaggtctggaccatctggagcaaagagaataaagccacaggtgatgtcatctgagggaaggggatgttcctggtctcttaaagggacacagtgaccctctgagccaagacacaccctcaagtcccagcccaaccccctctatgttcactgagccgaatcctgaggtattcccctgtttctcccatcacaagctgtgggccccaagtctcccatgataagagcatcccctccccttatattcttggttaaggctgtgcctacccaggatttcccagggcagggagtcatggccagctccgatgtccagaagtaaaggtgtctatacttggaccggagagagactgagaggcctggcatctggtggtttggatttaagctggtgtcctggcccacagaggaacaaaagatactcacagaggacattcagggtgactgggtcactgcggatgccaccatatcggtcccgtatttcacattgatagggtcctgtttcatttctcgtgacactgggtagaatgaggatcctgttttcaatgggtcgctttaccctgggactgaccgggaggctctgaccatttagccaccaaatgtaggtgtagttctcactcttaggttcacaggtgaagtttaagacatccttattctccctggggtttaagttgttgatggtgatgtagggcttgggcagcttcgctgtgtggataacagagagaagattgtcctgtgtggcacctttgattcctccacaggtatccttcaatcagagttggcatctcccacctctcattccacccgagtccttgaaagccaatagctggtgcttttgtcacaagatagatgcatgatgatctaagggctcaaagactgtgaggccgccttctctgtcttagggaagcacagactttctgaagtgtcaattgagcagcagtgttgggtcatggacagacacgtcagtgggagtcacagcccctggtacccttcccaggccctccctaatcagttgactggctggctcaccttgggttccttacctggaatatgcaactgctgggccccttccaaattccatcctactttgtccccctagatgtgatttctctgcagcttccatttcaaaggacattctagagatgagtaataatgggacttccctttgtcctgcaaccctgaagatactgagcagcctggcctgggactggatgtttcagcagaaataacacaggggagaccagaatcaaggctggaggtcagttcagtcatcaggcagtggaggctcaaggtggggcagttttttgcaggtgtttcatgatgacttacttgaaccagtgacctctaaagatagagcagagtgcaaggaatgatctagaaagagtgaaggggacaggcaagagctggtggctttggagcagaagcatgttccctgtcttgggttctttaagtttcctctccttctgcagagggcaggtgaggaccatgtggatctttccagaaatacatgtggacatttgcaaattcagaactgactggtagaaagggtgggaatgaactgctggaaatctggtcctcatgaaccatgtgtgtttgatggatatgagacaaatttggagagaggttttgcaaatattttatttcattggacattctactctctgattccatgggttcaactactctagggacctcatgtaagtggattccagagtgaatatgagaagagactgctggttgtcaggagctgggagtgggtagaatcagaagttgttcatgggtgtgcagtttcagttatgcaaggtggggaggttctagagaactgctgtagagcttgatgcctatagttcacacagattgagtatttcttatgcataagacttaggacaaaaagtgttttggatttctgacattttttgattctgaaatatttgtcatatacttactggtttagcatcccaaatctgaaagattcaaaatctaaaatgctccagtgagcatttcttttcagcatcagattagtaggcaaaagtgggaggtgataagccaaagatattcttgcccttttttttctctcaccacgtttctagcttggtgatcagttttcggtgaattccacagtggccatgctgcactcgtatatttttgaaggccttgggatgtgagaaaggctgattgctattttctatgtcatcagaactttccaccttttcatggttacctctttttctcagtgtttgtgttgtgtcagtcattaataagagcctgtcatgtgagatttaggacagtgttttctaattctgcaaaaaatgttactgtgattctggtaggggatgcattgaatctgcaactcattttgggtaatgttgtctttctaacaatattgattcttccaatccatgaaaatgaaatgtctttccatatattgatatcgtctttaatttctttcagcaatggtttgtagttttcagggtataatcatttgacttttttggttaaacttactccaaaatattttattccttttgatgttaatgtgaattgaaattatttccttaatttcctttcagattgttcattgttagtgtatagtctaaagaatgatctagaaagagtgaaggggacaggcaaaagctggtggttttggagtagaaacatattccctgtcctgggtttttgattttccctctccctttgcagagggcaggtggctcttccctgatagctagatagacttcactggaaaacatattgccaatgctccagggatccacttaccagggactatgatcctcttgattatgagatttgttccaccagtggctgagttatggatgaaacagacctagatccctgtatatgttttagtgatttggggtataaagaacacttgtgttgattgctggaacttcccagcaatcagccaagaatgctctgccagtggatggagtctgtgaggcaggagagcttggggacttcccctgtatggtaataggtgtatgaggaagaaatggtgggggcatccaggccatgtggagtaaagagaataatgtcacaggcactattgtcagagggaagggaaaatcctggtctgtggaagggccacaatcacagtgaccctgtgagccaagtcacaacattgaagtcccagccaaatccccactgtgttcacagatctggagcctgagaccttcacctgtttctcccatcacaagctgtggaccctgagtctcccatgacaggagcagcctcttttctcctattgttgatgaagcctaggtctactctggtttgcctggggcacaaagtcatggccaggtttgatgtccaggggtaaaggtctctgtattggacctgagagggacagagaggcctggcctctggccacgtgtatttgggatggcagcctggctcacagaggaacagaagatactcacggaggagattcagggtgactgggtcactgcggctggcactcactgggttccgtatttcacattcatagggtcctgcagtatactttgtgacacccaatagaaagagggtcctgttggtttcggacagcttcaagctgtgagtcatagggaggctctgaccattcatccaccacaggtagcttgcgtctggagtctcagggtcacaggttaagctcacagcctccatggtctccctgggatttaagttgctgctggagatggagggcttaggagtctccactgtgcagaaaacagggtgaagattgccgtgtgtggcgcctttgattcctccaaaggcatttttcaatcagaattggcatttcccacctctcagcccacccaagtccttaaaagcccatggcaggtgtgtgtgatacaagacagatgcatggcaatctgagggctcagagattgtgaggctgcctgcttcatgtgggagaagcacagactttctcaagtgtgaattgagcagcagcattgggtcatggaaagacacaggaccagcagtcacagcccctggtgcctctgtgtgtccctccgtctccaactgcctgcctggcccaccttgtggtcctcacttggagcatgcagtgctggaatcttgttagtttcagtctcactttgcccactgaggtatgttttctctgcagcttcccttgccaaggacatcctagagatggatgatggaacttcccattgtccttaaaacctttgggtactggaaagcctggcctgggactgggtattctagcataaaacaggggagaccagagtcaagcctggaggtcagttcagtcatcaggcagtggagccacgaggtggggcagttttcccaggtgtctcatagtgactgagttgagctagtgactctaaagatagagcagagtccaaggaatgacctacaaagagtgaaggggataggcaagagctgatagctttggaccaagaccatgttctctcttctgggtccatgatgctcccttccccctgtagagggcagttgaggaccatgtggatctttctagaaatacatgtggatctttgcaaatgcagaactgactggtggaaagggcgatcatgaactgatgacggaagtctggccctcatggaccatatgtgtttggtgaatattagaccaatatttgggaagaagtcttgcagatactttctctcattagacattctactctctgattctgagtttgactactctatgtacctgatatcagtggattccagagtgaatcagagagtagaatagtagtttgcaggagctgggatcaggggaatagggtgttgttccgtgggtgtgcagtttcagttatgcaggaagaggaggttctagagatctcctgtacagcctcatgcctatacttcatacagataaagtgctccttatgcagaaagcttgaaactaagtgttttggatgtctaattatttttttattttggaatatttgcagtacatgtactggtttagcatcccaaatctgaaaaatttaaaatccacaatgcgccagtgagcacttctttttagcatcacatcagtggtcagaagtgttgagttttgagcatttcagattgtggatttctggatttccgatgctcaatttgtaacagtgtaatttttccgtaaaaatttgtcaggagtttagacctcatgttatattctgactctagtaacaaaaaaaatttggaggaaacattaaaatgttttcataagtggaaatttttactgatggtccaaacatctaagatcaattgctggtagtagtatttctcttgagaccaaaataaggtttaggtgtgccgtgaattccagcaggatcacgttatgctcaaagaaagatgccaaaggtgatttgaaattagcagctccttaagtagagagagtcccattgaaaggaccgaactggtcagtgcatcaattacataaagggagaaaggatgtcaaattaaaagaagtgatgtgtgttatgttagtaaatatagaaagaactccctgcttctaaattctgtgcagagttaggaaaaatggggaggacctcaaaacaggtatgtgaaatgctttcttcattttctcttaagctcaggaaacaccactagagtttaagtttgtgtgaattaggaagagtctaagtgagatggcaatggctcttgtgtctccccacacgaagatctccaacttatgaaaatgacatcatcatgaggaaacagttataggtggcacaggcagtaaaaccatcagataacacccacctggtcaactccaactagtccccaaaaccaccggtattcccattacgtgtacattacagtctttgtagttgtcccacagctacaaaatttaaaaattgctattgtcaaaacaaaatattaaatatgaagttgaatatgttgttccactttttttccccactctttttgaactttcctgtttcagttttggaagtttctgttgacacatcctcaagctaggtattctttccacagctgtgtgcagtctaccagtaagcatcaaaagcattcttcatttctctaacagggttttttttttctgagacagagtctcgctctgtcaccccggctgcagtgcagtggcatgatctcagctcactgcaagctctgcctcctgggttcacaccattctcctgccttggcctcccaagtagctgggactacaggggcccgccaccatgcctggctaattttttgcatttttagtagagacggggtttcaccatgttagccaggatggtctctatctcttgaccttgtgcccgcctcggcctcccaaagtgctgggattataggcgtgagccactgtgcgcagccgtctctgagggagtttaatgagttgttgccttttgagtttgttcagctttttacttagtgttagaaccgagtgacaaatttcaagcttgttatacgcctgtcaggaagctagaactctctagaaagtgaccggagaatgtgagctccatagcaggttgaggatggcgtcatgagtgaggatggggtcaagagtccactcagagatggagtgcccagccatctctgagggattttaacaagttgttgacttttgagtttgttcagctttttacttagcgttagaaaccagtgacaaatttcaagcttgttatatgcctgacaggaagccagaagtctataggaagtgactggagaatgtgagctccttagcaggttgaggctggagtcacaggtgaaatgagcccatggggtttggggacagcaggcctgtccagcctctgacaccctggtgagtcagtgcagagattacaacagtgacagcaaactagcatggctgactccatctggcatctagtctcaggctggctgtcctcactcattcctgggcataggccaggttaaccttgggaggaatttagtttatggtttaaacttgaagcaagaatgataatagttcctccataaaactaacacccttactttgtccagggactgcctttgtaaaactagtgaaagaccatgagattaagattataggagggaactgaattttgctaaaatgtaggcacagtttctataatccctgactgctccagtgtcattgggacagggtttacaaaatttgtaactaattgctcctatagataacatcactattgtagaacgtgagattggtcttttgagatgtttctcattcttttgcattctggcaaccggctgacctcatccatacctatgactaatggctcagccagtcatgtggtccctacctagaggcagattcaagcacaaacagatcatgtccccctgcccccatgattccatcaccaaacaatcagcagtactaattttttagtcctgtggccctgaaactatccttgaaaatctctaagccctgatccactggggaggctgatttgagtaataataaacctctgtcctcctgtttggcagacttggagtcattaaaatctttctttactgcaaaccgccatttcaattattttattttatttatttatttgtttttttttttttttgtgcaggaggccagaggaacttgtctggcaattatgagagtggatggaggaactgcctatccctgtcccatggtcttgtccacaggtcagcctcacaaagggaaagagccctggatgggaatacagtggaaggtcattctcttagtgacctggggacattggctcgagaggaagcctggcaggagtggcaactccagatgatttctgtgcctttcctctttcctgggaggtgggccaggccacagtgttagtgggaagggaactgaacagccagagtggttagagggagtgtctagggaaggcctagaggtggaggaagaagctgtgcaggacagggcttgccagtcagaatgaagtgggaggaagatgagggacacagagaagcagagagaggcagatacaccatggcagtgagcagtgagggagacactgtcttcagaaactccagggaccaggtgcccccagttccatagtccaggaccaaggagccctcgagaaccctccggtggcttaagagcttcagaattacatgaggtggggtggctttaggggcaagaggtagtggggggatgaaacatggatgtcagcctctgaaggacaagggacaggtgtggctagaacctcctaggattctgcatccaagatccaatctctaaagaggttttggatcattcatttcttcattccattccttcatttgtcatgtgagagctcctgagtgtgtgtctctctcgctgggcctgtggtggtgtagagtgtgagtggggaaagaaaacaaggtcctctccttgatcctctcatgacagtgacaaggacactttgggaaacacaggatttcaggttcagtgatggtggttaagatctgaggaggaggcctggacatttttttgcactgactctgatggttgaagcaggtgatttagttctggagtgcagactaatcagctgaccatttgctctcactcctctgaggtttggatgcctaagaagagaggatttgagccaacaaatgactatggggtgcttggaacccagtaagccctcacttctggtggagtagaggatgggcctgtggctacagacagacctcatgtgaccctgatctcccctttgtgtttgtgtgactcttgctcagtcactgtgccttcctgtgcctcagttttctctcaatcaaataagctaaatggcaaatggactgtggcttttcatgctatctgtgaataaatgttaaattattcacagtcacctgacctaatgcttggcacagtggaggtttcacacaaacagcatttattattaatttgcttccatgagaaagcacctttacgtcagatccctgtggacaagctgctacctggtacatcttctctcttctgtttctgcttctggggacattagtctttctatggactatcctaagcctcctaaggcagttgggtgatggcctacaaagcttgtctttctgtcctctccactctgagtatcaggtgaagaaagctctgtcctggcccagatgaggctctgagggctgagccctggctggtgaacagctccaggagacacagtcctctgacagctggtaaatccttggtcccagtaagccctgcccaagaagccacaacccagtcccagcacaggctcctcagctttatctggaacaaggatttagggacaagggtctggggttgaggcttctagggctgagcttctctgagagtatctcagggggcccctcaggccaagccctactcagttatccagggtctttctcagggtcaaatttatgaagagggcatgaggtgcttggctgagactgatctcctcctgctgagtccccccatcagactgtccttcctctgcagcgagtgtctgcagggtctggatgcaggaaaggaattctgatctgttgaaatttgtctcctctgtgtgtgtcctgcactaaatgcccaaatcccagcatgggacataacgcagtgagtgacacaggcagagtccaggcctgacaatcctgtgtgtgtgaagtagaagtgacccctgtcccccaacacccagggatcatgtggaatcacttacggtgtaaggtgaaggtgaaacgtccagttactcctctagtcccatcatctccctttatgatgtgtaaggtgtaggatcctgcgtcctcccgggtgacattctggatcagcagggatgcattggaatatgctgtttctcgtccactatatgcaggcccatatataattatttcaccgtctactacatatgatgtaatgtaatggtagaggtccctcatttgccctttgtaccagatgtagccggtaagattctggggcaaattgtggacaagtagaagaacatccttcccctcggaaactttggttggctcggcttcaatcgtgacttgggcagtggtgggcaggttccagaagtttaaaagtgatgctaggaggtggagagaacatcagtcaatattgagacctatgtattggtgtgaaaacatggggccctgggtcctgagaaggtctcttcagtcctcagccttgacaacacagacacacacacacatacaaacacacacacacacacacacacaaaagcggcatgtgtgattgtgtgtgtgtatgtgtgtgtgtcctactgtcctactaggtcaaggtcagcagcatgacgcccattccttcaacacttctgacgttggcatttttctgtttggaatcctcttccccaggggtccgcatggccccctccacaatgccctcaggtcctgcttacatcagggcatcgttagacttctttcctgatgcctgcttcagagaccctgggtcttccctttctgacctttccctgctctgctccctccagggttcttgtcaacacctgacctcacattctagatctctttgcatgtctgtcttcccccccatgacagcgtgagctccgtgaagacagggacttttgtgatcttggttgcaccccagtgcctggaacaggctgcagactcctgtagatgtgagagttctcagggccctccatgccctgggtgttttttttcccccaattgttgaggtttcttgctgaggacagtgtttcctgccctgtttatatttttatttgaggtgtcatctgctatagttattattatcatttttcaaaatatggtggcccctgatgattaatcaggaaaacagaacacttaagattttcctacctcttaccaattccggtccaatacgactttcctgttttgacccctgtccctctctggtgtattttcccctatccaggctccaacagagccttctttcctttttttcttttttctttttttttttttgagatggagtcttgtactgtcgcccaggctggcatgcggtggtgctatctcagctatctgcaacttctgcctcccgggttcacgtgattctcctgcctcagcctcccgagtagctaggattataggagcacaccaccatacctggttaaatttttgtattttcagtacagacagggcttcactgtgttggccagactgatcttgaacttctgatctcatgatccacccacctcagactcccaaagtgctggcttctttcattttttagaaccccatcctctccaggagaccccatccagtcactctgcttcctcctcctgtcctctcccaggaagttctctcctcacctgtgagcaggagccccttccatttgatgcgctgtgtgcagggaggggctgagagggttcccatggtctctgctgcttgtgtgttctcctctgtggagataagcctaggatccagaaactctctgagcacggctgtcagctgtgctgtccttcctctttctgtgctgagcctcttcccagggcaggagcaattctcaagctcatgggcagggtcaggcccaggacacctctctgtcccctcctctctaagtcctgcctccttgtccctccttctgtttctccttttgtctgtgtttcaggtccctgggaattgtggcggcctctgcctttttcagcagtgattctttcaccaaacctcaagacacactttgtgcagacacacagacacacacacacacacacacacacacacacacagaagagatacacacagacccacacagtcagacacataccctgcaggttgggcaagaacagtcctgggcctcagcctcctggtgtccccatggctctgggtcggggtgcaaattaacgccctttggcctctttcatccccatcaggctctccccttcagtgcaggaggctggagctgtaccaggtccctgtcagaatgatgccccattgtgctgtgggtgagctgtgtgttgcctggtgagagggacccttcctttctctaatcatgtctagcttggctgcagcttccaaggatggacattcaggacctgggtgtcccagaggaaactgtcctttctggcggtgtgcagggtgaatctctcatgcctcttgggaggagaggcctgtgctggttgctcagtgggggctgtgagtcccatagtcaaagggacagttctctgtcagtctatggctccctggggtctggcggctgagctggagctcatagtttctcatgttcttcctgaccatctttgatgtcctctcttctctgcccagctgactgtcctgtggtcaccacaccttccctgtggtggtgcaggaggaagtggggagttacccaggaaccctgcgggacatggctcattgagatgcgggagggggagcctgggacagagcaggggttcagagctggagagattcatcccaacttactccgtggccatgatgggctcagccctccatatgctgacatacccaggggtctgtcctgatggttttgacctggccaagctgctgtgtgtagaggaggaacaggcagtggccagagagcctgtctggagggacattgctctcacctgagagggcgggtgggggtgagttgtgttctgagatcaaagagcaataacattccccttcttcccgcaagcacacaggagaggtctgtcttcccaagggacagctggtgttaggtggccacatcccggatggtgcctgtgtgtgaccatcacacgcgctctgagcccccagggtgcagcgggcaggcaggtcacagggtgcctggctgattcccggggaggctgtgggccctcaggcagccgctgttctgtgtcagcgctaggcttggcctgggatgccccagagaacaggacagatggagcaggggtgggcatttagggagcagtgccagaaagagttgatgaggatggagggaggtcacgaggggaaagcacccggtgtggcatcgcgtgcaccagcgctgccctgggagatgcctttagctgggcccagggaaggagcaggtgtgtggggaggagctacctgcagggggagtggtgttaggttggcggccgccaggtcagggaggagctgacagtgtccgtgtggggagcatggagggcgctgaggacttgggcagaagtgaccctgtagagggtggacactgctgggctgtgggttccgctgagtgaggttggcatcccctgggaagactccaggctgggagggactctgtccccctctggtggacagggagggaagtgtgaacggcagcaattccaggccaggatgcatgttttattccacgtggatctgcacagttcacacgaggtcacacctgtgttatgttacagccccatcaccttccagccccgtgagtcccagtctctgtggctctatgttcactgttctccctctttcacaatcagatgtcccaaatgcagatttttgtcaccttctgtgagtttgtgtttgtgtgcagtaggcggcactgtgtataccctgggggcagtgatgtctggggctgagcactgcagttgggcttgggagcagcagggtgggaagatcaatgtcaggggggcagggacaagtcattttcattttctcactcccagggaccagaacccaggattctgactccagggcagagtaccacaccctgctggtgtccctggatgtcatgatgctcatagtgtcatgttgccttggcattcattttttaaggtgtaagtttatttgcctcaaatcagaggcagggcttggtcaccatggcagttttcaatactgtgtctggttcaagtggctccagttggtgtccagagatcaaatcttagagacatctctcctgcttggtgtgctgggctcccgtctctccagctgctttctttaaactgataattctgacattcgccctcacattaaaagtgaccacctctcagtcacagcgtgagctcctgttcccagtgtttgctgcttgctttgaacacatccattaaagctccctgctggaaacctgtcagataacaccctggacttaataaagccattggcttaccggtctcttctctcctccctccctgggctcactgacctctgtgtctgtggtctccaggtgtgccaagtgcttcccagtgtctgtaagtagtaaaaatacttacactttcacgttgtggttgtattgctgtggcctcacatgccatccagggcctgacattgaggctgccttatgggacctgtgctggctgagcccctgctggagctcttgttttggggcctctggttctcttggggacaggagcttccagctaacttgattgaaaaactgatgcatttcattgaaaacactgggtcagatgatgtattcataggcttcagctcctataacaaacaccttagcctgggtgaattaaataatagaaatctatttttcacagttctgtgaataatgtgctattttaaccactttaaaatgcacaatcaatgaaattaaccgcatacaccgtgttaaattaccatcaccagtatttttcctagaaaattgttatcattttaaactgaaactttgtatcttttaaacaataactccctgtatgttccaccctaggccttgatcacctctactctgtctctatgaatttgcctattcttgatgtttcatataaatggaattatacaattatgttattttgtttctgacacatttcacttagcataatgttttccaagtccatgcatgttccagcgggtgtcagagcttccttcctctttatggcagattatcattctgttttatgtgtcaccatatttgtttattcatgtgttgatgaacacttggattgttttcatattttatcttttctgaataatgctgcaatgaacattcccatgcaagtacctttttgagtccgtggatttaattctttgggtatatacctaggaatggatgttatttcaaatgagaattctataattagctttttgaggaacagcaatactctttctcctagctgctgtacttttttatattctcaccagccatgtatgaggattccaaattctacataatgctgctacttgttatttaacattttaaaagaacggtagccagttttgtaggtttgatgtggtgtctcattgcagctttgactttgtattttcctaatgactaatgatgtttagtatcttttcatgtccttcttgactatttgtatatcttctttgaagaaatgtatatttgagtcttttgcccatttataaatttaatggtttctccttttgttactgagttgtagctagttctttatattatctggacatgaaaactgcctatatgtggttgtcaaatattttctctcattctgtgtctattaattattgtcttgataattttctttgatgtacaaaaggctcacatcttgataaagcccaatttatcttgtttttcttgtttctcatgcttttgtatcatatctaagaatccattgcacatttgagttcatcaatatttacctctatgtctattttaagatgttttataggtctgatatttaactcactgatgaatttttcagagaattgtttgatatggtgggaggtagagttatctaaattcactgttttgcatgtggttatctagttgtttctgcattatcattagaaaggagaattgttcctccattaaattttcttgacaccctcttcaaagagtaattgaccataaatgtgagggtttatttctagactctcaattctatcccatttttcattatgtccagtcttttgccagcagcttgttttaataattgtactcctttgtgagattgcaaataagaaagttcaagtcttacaatttcttttggcaggattgttttcactattcaggggtacttttttgaaagatggggaggacaaagtttcacaattgggaaagccgtttctgtcttcttcagggggaaatttgggagaagcttttaagaaactttatctaagtaggtaaactgtcaccactttatttgctgaagtgctatgttaaagtgtgcattgcctcttgtggaagaattttggaccctggaagcacttgcccacgtggtgagagacagtgaattccacgatgaggggcagagatgatgttgttttgtgatacagtgttgttgggggagttgtatacatctcaacttctttatgtctctgtaaagtgggcatagggagcagcccgcagggtcggtgggtttttctccccgtgtgcagagacgtgagattgtagaaataaagacgcaagacagagagataaaagaaaagacagctgggcccgggggaccactaccaccaagtcatggagacagatagtggcccttaatgccaggctgtgctgatatttattggatacaagacaaaagggcaggataattagtgtgagccatctccagtgataggtaaggtcacgtgggtcacgtgtccactgcacagggggcccttccctgcctggcagctgaggcagagagagggaggagaaagagagagagagcttacagcattatttctgcttattagagacttttagtactttcactaatttgctattgctaactaaacagcagagccaggtgtacagcatggaacatgaaggcggactaggagcgtgaccactgaagcacagcctcacagggagatggtcaggcctctggataactgcgggtggacctgactaatgtcaggccctccacaagaggtggaggagtagagtcttctctaaactcccctggggaaagggagactccctttcccggtctgctaagtagcgagtgtttttccttgacactgaggctaccactagaccatggtccgcttggcaatgggcatctttccagatgctggcattatcgctagaccaaggagccctctagtggccttctgtgggcataacagaaggctcgcactcttgtcttctggtcacttctcactcttccctgcttccctcttccaaccacttctgagctacaaatgagaaggaagcgatctgattaaacaggtgatgagcagagtcacgttctgaggggatttgcacttttaaaaggagattaatgaccacatctgacaatgtcaccctggaatcttatgcagagtgacaggggagtggggatgagctccgttcaggttcaggaagcgagagtttggatctgaagtacttttcagatgctgaagtcataggagcttgcagttgcttcctgggtggagccataaacaaacatctcttctgctgagtggggtctgagaagatagagggaacggtgacccaggagctctggaattatctggctgtgttacacttgcaggactacacatatttaagtgaaaacaacatggttttcatccacctggctgacctcttagcctgctttcctcttattgttccctcgaaggcatcattttttgaaagagaaatttaaactctgtccatctcatcccctttggacaaaagttgagtcctttctgagctctttcatcatctggagtttaaaagcttcccctcctctgttaactctctttgaatccctcatgtcacaccaaacttcaaaagagacaaatacttttgcatgactccctgcaggctccgttttgccctgtagtgacagccccatgtcttggctttcctgattggaaaaacttctcaagctttctgcattcatgatctctgcttcttcagtgcaaccttctccagcttgtctctgatctccaatggtccctgcattaatcctgtccaagccacaggtgaccctcatatcatctcagcttctacttcccagtctctctctctctctcttttttttttgagacaggggtctcactctgttgcccaggttggtctcaaactgttgagctctaaagatcctctggcctcatcttcctgagtagctggtaggggtgtgagcccttctgcttggtctccagtcctttgcttttcttttttgacctatacaacatttggtggttgatgtccatgttcatgtaattgtcttctctggcttcttggggccaccatgcattcccttctccctcttttcatttattatcttttcatctagtaagacccatcttcccctgaatatgtatattttcctcaaagcaaggattggcttaccttcacaaactgagtctccaatgaccacataaactgaaatgcaatagaaatcatggacagatgtgagctcctcttctacttcctgtgtcctctgcaggttcttctcaccaacgtcacgtattgttaagtaagccagtgatgttaagttagaaagtggactgattccattaattcatttggcatgttccgaagtcctcacctgagatctatctactctccaaattacacttgttagtaatacaggaagatctttttcacatgagctaattagggtgaatacatgtaagtgttggtaagaagtactagaaacactggaatttgtgagatttcattgaagaaccaacttccacccagcccttcacattgttctcttttggtagtttcttgtcatttcctccttttattatcaatagagctgctgtgaacatgcatgtacaagtttctgggtggacatatgttttcattttttggggggtagacatcaaagagtagaattgctgggttgtatgatgaatctgtgttccaacttttcagaaactggacttctactccttcctgatttcaccttccacgccatttctgtagtgaggcccactccttggccttataagacctgaattaagttaggtgcccagagccgttctgtcattgactctgttctttcccttgctagcctgtgtaataattggcaatcagacctttacgtgcgcaatggtttcatatgtctccccaactatattacaagttccacgggggcagggctatgtctatctccttgacctctgtatctgcgatgcctagcagagggctgtgaacaccggtcaccctccataaacactgggagacaaacaagggagtcagtagagttagtttttttgcctttttacccccagaactcttagaatatgatttgagctattgcttcaaggaagtcctggggcagatgatcattcatagatgacatgagggagtgcacagcacatgagtttgcaggaaaatgcaaaccccacattgaaatttgatccccaatgttggagatggggatctacatgggggtgtttgggtcatgggggcggatccctcatgaatggcttggtgctgccctcatggtaatgagtgggttttctactcaatcctgcaagagctgattgttagaaagagcctggcaccttcctctcctctttctcttgcttcttctctcaccatgtcatctgtgcacacagcagctccccttcccattccaccatgagtggaagctccctgaggcctcaccagaagcagatgctggtgcaatgcttcttgtatagcctgtagaactgtgagccaaataaacctcttttctttataaattatccagcttcactcaggtattcctttttagcaacacaaaactgactaagacagggtatcaggagacctagctttgcctgaatctgagaactccatcaggaatcttggaacaatttagcccacaggtccaaggctgattttttgtcacagtgaagttcaggtagtaagaattctcactggtggctgttgacggtggcggtggtggggatgggtcatatggagaattagcagtgggagactagaaattaaagtggataaagggaagaattaaaagtcaaaaacagtgtgagggaggaaaggaatggatataacacctcacagctttatccttgagaggccttaaagaatctacttaataataatcagatggtattctataagaactttgagactagacatgtgatgacttttaggaaactgccctggagctgaaaatgcatgcaaatctagctgactcagctccagccttaactggctcataacttgtttcataaacatgactgtatgttagcaaggaaatgagagagaataacagcacatcacataggcatgaaaagtatttgcaaagcagcagttctcaacaatgacattttgcagagttttccagaagcagattcagaaaactgaagaccaaagtaatgagggagctgtctcatgcctagatgagcagaagcataccaaaggcttagtatttccccaagtaataggcacctgaaacttatttaaggaaaatactcttcttgatgaaacaggcactgcagttgaagcaggaatgtgtttggtgtgctgccttaaatagcatgggtagatgttcaaacatgttaggactcgctggccctaggaaagacccgcaagtatctggtctacaccaggaaagtgacaatgaaacaccaaacaccttttctcctctaattaccaagaaaagtatttctttcccaatggtggaagacaataatgttgggaatgatgaagttttctggagtgtgaagtggatatgtcttataagtttaatccacagcttcaccacttcataagtggataatcgaattgtgcctcagtttcctcagacttggggatattaagagtatcctcagtcaccacaaggtgggtaccaacataagaaaagagtgtagcaaaagcccatgggtgcatgttcttaaagtgcctagtgtgggattagaatgacaagtggtagatgacctacttgtgcagaaatttagagttattttgtgattttcaaatgatcatgtgtgctttccatatgctgtccagactgggggtgctgcagctagaaagggaagaaggtttccatatttcctgagactggagtcacatcctctcaccaatgcactcacctgctgactaaccagtgtacttctgggaattgcaaatgcatgaaatggcacccattctagactagtcacggcagtgttggtgatggccacagatcgggaacgaccctgacgtttatccatagggaactgggtcatgagccatgatccacatcatggatactgggcagctgtggcaaagaatgaggtatctttcttctgtgtactgggaaaggtttccaagatataccgcacagtgagaaaaacaagaagcagaacaatgcacggtgtgctacctcttacattacataggaggaaatgtaaaattaatttaccaatggccaataagcacatgaaaagatgctcaacatcactaatcatttggaaaataaaaatcacggctacagtgagataccatcttacatccattatgatgattgttcttaaaaaaaagaaaaacagaaaagaacaagtgttggcaggtaggaattggaatgcttgtgtagtgtttgtgggtatgaaatatggcgcacccactgtcatcgtttctcaaaaaattaatcatagacttaccacaagatgcagcaattcggcttctggtgtattccaaaaagaacggaaagcaggggccccagcagatatttgcatgtctttgttcatagcagcattattcacaatagctagatgttggaaataagcccagtgtccatccatccatgaatgaataaacagaatgtggtctatacgtacaaatgaatgggattaaaccataacaagaagggtggttctgatgcgtgcttcaacatgaataagccttgagttctttctgctaagtgaaataatcagactcaaaaagacaaacattgcatgattccacttaacagaagtgcctgacgtcatgaaatgcatagacagaaaatgaaaaggtggttgtcagcggctggagggagggggaaagaggagttgttgtttaattggtaaagaattccagttggggaatatgaaaaagttctgggtggggatggacagtggtggtggttgaacaacaacgtaaatgtacttcctgccactggatgtacagttaaaagtggttaaaatgggccgggcaaggtggctcacgtctaatcccagcactttgggagattgagacaggcggatcactttagattaggagtttgagaccagcctgggcaatatggtgaaaccccatctctactaaaaatacaaaaattacccaggcatggtgacaggcgcctgtaatcccagctacttgggagggtgaggcaggagaatcgcttgaacccaggaggcggaggttgcagtgagccaagacggcgccactgcactccatcctggacgacagagggaatctccatctcaaccaaaaaaaaaaaaaaaagaaattaacgaacgaagagcatctatgttccaaatgcagtgtattattttatgcaggctttcacaagctccaaaagattcaccgtgcagaactggagattctagagaaagaccacgcctcctcctgcgggtaactcttcattcagcaagcagctcttggcttatccctgggcttagtggaattcgaatacctgaccataggacaccaagggctttgggacctgaatgacacatcatgtggtggtgacatctgagttacctggggcgtgcacagcagcctccagcatcccagggagagctgtgtatggggtcaggctcaagcaggtctcagggcaccagtgacccaatgggtgactcagactcccatggcacctgctccttctgtttctcccttcgccatatatatgagctcatgggaaacgctgtgacctcttacagaggaggaaagttcatggacttctagcttctagaactgtgatacaataaactcctgttgcttatctactcctctgcagtattttgtcatggcagccctagcaaactactatagtgactgtgggggttaggatgacaccaagcatcaaatgccactccctgttccaacagtgagaccattccacagcccctgaatgacaagacaggccttcaaactcaagactacctggctaggtaagaagtactttagtcacaccacttctgaactttcttgcctacctgcagggcaggaatttttaccatttttaaatgaggacactgaagctcagagaagtgatgctatttcctgatgggtaagaggtgatatatttcagtcctcagaccaactctggagtagcaaggttctagtcttaagagtcaaacttggctaggcatggtggctcaagcctgtaatcccagcattttgggaggccaaggccggtggatcacctgaggtcaggagttcgagaccagcctggccaacatggtgaaacctcgtctctactaaaaatacaaaaattagctgggcgtggtggcatgtgcctgtaatcccagctacttgggaggctgaggcaggagaatcgcttgaacccgggaggcagaagttgcagtgagctgagattgtgccattgcactctagcttggggaacaagagtgagacatcagctcaaaaaaaaaaaaaaaaaaaaaagtcaaccttgagccaggcatggtggctcatgcctgtaatctcagcactttgggaagccgatgaagtcaggatttcgagagcagcttgggcaacatgctaatacgctgtctctaccaaaaattaaaaaattagtgggtatggtggctcatgcctgtaatcccagctatttgggaggctgaggcacaaggatagcatgaaccctggaggtggagctgcagtgagccaagattgtgccattgtactccagtctggagtgcaaaaaaaaaaagtccatctcaaaaaaaacacaaaaagaataaatatggggcctcatgactgtatattactgggcttccgacctagactgaaagatcagggaagactttcctgaagagaaagtgagctctgatgggcccactgtactctagcctgggcaatgtaatgaggctctgtctcaagaaaaacatgcagaataaaaccacaataagataccactacagaactattagaatggctaagattaaaaagagtgaccatgacaagtgttggcaaggatgtggaggcactggaatgctcacgctactggtgggaatgtaagatggtacaaccactatgaaagcagtctggcagcttctaaaaatttcagcatacacccactatactactcggcaattccattccattcccacattatttttatttaaaggaaaatcaagtggtatgatctttaaggcatttttgcctgacaaatagatgaaatgtgggtagcagcccaacactccctggtaagtcttcacagggcatatgtggactcgtggcccccaggaaatatggctctttccacaagtgctaagtccactctctccatcaatcctaagatgttagttccacagcactgccagcattgggctttgtctatttctttctttctttgtcttttttgagaggggtcttgctctgtcatccaggctgaagtgcagtgatgcaatgttggttgtaatggctcccatttcatttccaattgatcttatttggctcttccctctttttttcttggttaatcttgccaatggtctatcaattttatttatttttcccaaaaatcagctttacattttatttatattttgtattattttgtttcaatttcatttagttctactctgatgttggttattttctttcttctgctggatttgggtttggtgtgttcttgtttcttgagtttctagaagtgtaaccttagattgtctatttgtgctctttcagtctttttgatgtaggcatttaaggctataaacttttagcacactctttgctgtattccagatgttttgatagggtgcgtcactattgttcagtttgaagaatttttaaatttccatcttgatttcatatttgacccaatgatcattcaggagcaagttatttaatttccatgtgtttgcatggttttgaaagttccttttggagttgatttccagtttattctaccattgtctgagagagtacttcatataatttcaattttcttaaatttattgagacttgttttgtggcctatcatatggcctatcttgaagaaagttccatgtgctgatgaatagaatgtatattttgtggttgttgggtagaatattctgtaaatatctcttaagtctatttgctctagggcatagtttaaatccattgtttcttccttgactttctgtcttgatgacccgtctagtgctgtcagtggagtaatgaagtccctcacaattattgtgttactgtctatctcatttcttaggtctagtagtaatggctatataaatttgggagctccagtgttaggtgcatgtttatttaggactgtgatattttcctgttggacaagtccttttattattatataatgttcctctttgtcttttttaagtgctgttgctttaaagttagtttttttgttataagaatagttactcctgctcacttttgtggccatttgcatggggcgtctttttctacccttttaccttaagtttatgtgacactttatggttaggggagtctcttgagggcagcagatacttgcttggtgaattattatcaattctgcaattctgtatcttttaagtggagcatttagaccacttatattcaatgttagtattgagatttgaggtactgttccattcatcctgctatttgttgcctgaataccttggttttattcatttatttattgtatttttgttttataggtcctgtgagattcacgctcaaagaggttctgttctgatgtgtttccaggatttgtttcaagatttggagctccttttagcagttattgtagtgctggcttggtagtggcaaattctctgagcatttgtttgtctgaaaaagactgttatctttcctttatttatgaactttagttttgctggatacaaaattcttggctgataattttttttttctttttctgagatggagtctttccctgttgcccaggctggagtgcagtggtgtgatctcggctcactgcaacctccgcctcctggattcacgccattctcctgcctcagcctcctgagtagctgggattacaggcgcctgccaccaggcctggctaattttttttgtatttttagtagagacggggtttcaccatgttagccaggatggtctcgatctcctgaccttgtgatctgcccgcgtcggcctcccaaagtgctgggactacgggcgtgagccaccgcggccggcctgataaatttttttaaggaggctgcagatgggtatgcatgctcattggaggtgttcttcccttattgaagattattaaaatcacatgtgttgaaaagcatttgggactgtttacttaattgatgagtactcatttatttttacattaattttgataccatgtataaacaatatataaacataggtatggacatatacatatgtgataggcgatacagcatagaacatatacatgtgcacataaagatagagtgcgacagaaatacttcagatttttgattttaaaactttatgcatgaacctataaaactccctgttaaaaaaaaaaaactggatttaaattgtgctattgtaaatataaaaattaacatttatctgaggaagcccttgctgagttttagagagagtaggtagtaaatttacatctcaaagcacacacacacacacacacacacacacacacacacacacacagaagaatttgggtgtgttcaaggaagattaaaagtagatgccaaggtaacacaaaaatgatagaaatttataacaggattttataaggagaccaattttatttccatacatagcttttattttggtctctgttttccaactgtactccaggaaacacactacacaggctcccttcttaagtgctggtgagccactgcatatacagacagcccactttaagggaagaatcaggggagaagagatgcagaccccagaattatgccaacatacaaatgcctaagtcaaaggtcaaactgcacacttgaaatctcatcacctgtttggccctgttttcagtgtactttactttctttaatttctgctctaaagcttttaaatgaactttcactcttgctctaaaatttgcctaagtctcttcttctgccttatgacacttagtttaattctttcttctgaagaagcaagaattgaggctgctgcagacttgtacagatttgctgccattaatatactttagtgccattctacatgatagaatatacatattcttatatttatacatatatataaaatatatgtattcatagaggccttgaatctacattcttgctgcacttcatgtaaacaatccaggtagaagactaaaagttattttggaaatacatttgtcccatatgatttctatttcataaaaatgggagacaggagggggaaaattatttttagaaaaaaacaacagaacaacagttattaaattttagatctgttcatttttttttttgaattttgttatttacctacaatttgggctgaatcctaaattttttcctggctacaaatttcaaaactaatggtttcagaattttcttccattttggtatattataaattaaaactgtgctttttaaatttttatcatttttttattacgcttttaagttctgggatacatgcacagaacctgcaggtttgttacataggtatacatgtgtcatggtgttttgctgcacccattaacccatcatctaccttaggtatttctcctaatgctatccctcccctagtcccccacccctcaacaggccccagtgtgtgatgttcccctccctgtgtccatgtgttctcattgttcaactcccacttataagtaagaacatgcagtgtttggttttctgttcctgtgttagtttgctgagaatggtcatttccagtttcatccatgtccctgcaaaggacatgaactcatccttttttatggctgcattgaattccatggtgtatatgtaccatattttctttatccagtctatcattgataggcatttgggttggttccaagtctttgctattgtgaatagtgctgcaataaacatatgtgtgcatgtgtctttacagtagaatgatctataatctttgggtatatacccagtaatgggatcactgggtcaaatgatatttcttgttctacatccttgaggaatcgccacactgtctttcacaatggttgaactaatttacattcctaccaacagtgtaaaagcgttcctatttctccacatcctctccagcatctgttgtttcctgaccttttaatggtcaccattctaactagcatgagacagtatctcattgtggttttgatttgcatttctctaatgaccagtgatgatgagcttttttttgtatgtttgttggtcacaaaaatgtcctattttgagaagtgtctgttcatgtgcttctcccactttttgatgggcttttttttttcttgtaaatttgtttaagtttcttgtagattttggatattagccttttgtcagatggataggttaaaccttgcaagctgaaactcgatgacttatgtaaacttctggagaaatcatagcaacttatatataaacaacctttgtgcctgctgatgtgtactatacaaaaggtacacatgaacgctggattcagactgcaattcagaaaaatgtgtcagattgccattgcaattagaagatgcttcagaaactctagaaaacctagtctatagggttagagtgatgtttgccaaacgaattgctctaattgaagcagcagttgtgtgactttaataaagttccaggattatactgtccctttgttgctgtgacttccctttgcctttttctgatttgtcttcatccccttttccacggggcatgacttcttaagaatgagccttcctagtgatgtaggatcagatgaaacatacagtcacaaagtcatgtcttctacaatgctttctctgaaagcttttgaagaatcgagggaccaggtgtgctgacacagacctgtaatcccagcagtttgagagtccaaggcaggaggatcacttgaaaccaggagtttaagaccagcctgagcaacaaagggagaccatgtctctaccaaacataaaataaatcaaattagccaggtgcagtgatgcatgcctacagtctcagatacttgggaggctaaggcgggaggaccacttcagcccaggagttcaaggctgtagtgagtacactccagtcttggtgacagagcaaggttgtgtctctaaaagaaaaaaaaaaaggaaaggaaaagaatggggtaagcaggaaagccaaagatctcgggcatctccagatgattccctgaacaaattgttttttcttggcttcaaaacctttcaagatgtatatttctttgtaaaagaaagacatgccaattgtaactttaagtgagcagtcaaaatctagctcctaaaactgaagtattttaactctcattctgataatatttattttctgaggcaaagaagaaagacaagattagatgaattgtttttctgcccacaccatctcttccgacatgccttatccctttaatcaaatgtataaatactaagcctcctgaaacctcttcagagaaaacacaagccacagaggtttttttgcaactcatgtattcccagggtgtactttcaagttctggctcaataaatctcaatttatcaagacccttgcctcagtcagtcattctggataaccaccatgagtcctgcaaagcccttcagtaatctgttgcctgcctaggtgatgtgtaaggtgagtcaggtcttcatgagtcaaacactcgtcttcctttctgtctttcccaaccctaccactcagtgctgtgtgctctgatctgaccccagctcccaggttgtttgtattggtctaagaaagcaagaccaggaggggcaggttgagaaggaagtaagaagtgaacatggaaagtggcaggtggggctgtcattgctcaaagccacacaccctgggtgcattttatgaatttttctggattcataatcttttccctgtgtgtctatctagaaactcacccccctcctactttcttctcattactctttctgtttctagtgcactcgtttatggccagagaatggccgtgtaaatagttgacaatagaataaaaaatgatgttttctgagacttggaagctggcctttcttttttccaaaagagattggggtttctaaaagctagcttttatgcagggctgtgcagttgtgagtgtagttttagggaacagatgcataagtgaagggtgagacagaaaacaaaatgctggctgtttgtcaaatcctgaaagtaaatgggacaaaaatcatttttgaaggaggatgtcattcaggagaccttgtacatcttagcgtgtcctcttaccagaagaattggaggttgaggttgaattatggatttaagtgacagtgggtatataattctctgcctcagtttttttttttaatctgtaaaaatggggattgtggctcttgggattttttggtgagcactatagttacctgaaaagctcttaggatagtgcctggtgcatagtgagtgctgcatcagtgtgagctattataattatgggaatatacaaaggtatcaccctggccatccagagtggggagatattttctggtcagggtccaggcaggccagctggagatgaagctgattagtagggaagcttaacttccaggagtggaagaatttaggaggagtaaacagaatgcacaacattctgcaaacattcctttacccaacagtaggaatactcagagtgggtgtgtcttccgtgacaatcattatctcctgggaatctaagaatgtgttctagagtcaaatggctttgatgtaagccaaacccagaaatgggcttcagggctgccttgcacatagcattcattcatcttgaaaaaggaaagcattcatcttgctaaaggaatcccctcttctggcccaggccattatttttgtttttgtgctatcctaatttttaaggtgtaagcagaaagactgaagaataaaataatgaagtacatgaatgaaataacagggtagaattgagactgctacatgtaagttaagagaaattgtgtataaatttttgtgaacagaaaaaggatttcttgttgcaaacagacctctctatataaataatacctcctgccttgagtggatagcagaccgcatcacaagaacattccagcagagtcatgagagaatggttagtgtggcttctttaattgtcaggttagactgagtaagttactgaagagaaaggagttgaaggagaagatgggtgagggcaagaaaaatgggaaggtgaaaggaaaggactgaaaggaatgtttaccaagggctcatcaggtaccaggctctgtgactaatgtcttacacatgttaatttactcttccactgtcattttctgatgcagtaagagtcagccttacactgcagatgaggaaagaggctgagggaagtcaaatgagtggcccagggtcatccagccacttcatagcagagctagtgtgtttcactgtggtttgtgcagacagaaaagtgagacatggaaggaaggcaaaacatttttgttgtgggtgatgtttatgaaagtgacccgtatgaggcagaataatggcctcttaaaaatgtccacatccgggccgggtgcaggggctcacgcctgtcatcccaccactttgggaggctgatacgggtggatcacgaggtcaggagttcaagaccagcctggccaacgaggtgaaaccccgtttctactaaaaatgcaaaaattagctgggcgtggtggcgggcaactttaatgccagctacttgggaggctgaggcaggagaatcatatgaacctgggaggcggagattgcagtgagcctagattgtcccactgcactccagccggggcaacatgagtgaaactgtctcaaaaaaaaaaaaaatccacatcctaactcttggaacacatgcatttacttttcttggcaaaaacactgttcaaaggtgatgaggttgagtatcttgagatggaaagcttattctggcttatctggatggctcccagtgtcatcataggggtccttgtaagtgaaagagcaaggcaggagggtcagggtgagaatgatgcagtctgagagactccactggccattgcttgctgtgaacatgtgtgataagacaaaattacaactgatttagttatagatgtaattggtttttatttgtgatttatgatttggggcagctctccctctacagatgcctcagcatcccaagtagctgggactatattgtgggatctggccagcaacctgcaatgcaacagggctctttctttgttcccaggcagatcggcaagttgagaaataaaggacacacacaagatagggaaagctgtgtccaggggtgtcaccgccttctggtcctgcgatgctgccaatgcactggatacaccagcatttattattaagtttagtgagagtgggggtagtttagtgagggatttagggtcatttataggctctccataagggtcacattcctttcccagagctacagacatctgcttttctgggataggaatcttggtaatgtgaaacctccctgactgcccatccattcataggctctctgcagggggaagcacatcacgtgctgttggctcattctggcagtccaacctggcatttttctttacacaatccttcatgcaattttgtacttacaataatcaggagctttaaaggatgtcttgttatgtaaaaatgtgttggctgggtgcggtggctcatgcctgtaatcccagtactttgggaggctgaggcgtgtggatcacctgatgtcgggagttcgagaccagcctgaccaacatggaggaaccctgtctctactgaaaatacaaaattagctgggcatgatggtgcatgcctgttatcccagctacttgggaggctgaggcaggagaatcacttgaacccagggggcggaggttgtattgagccaagattgtcccattgcactccagcatgggcaacaagagtgaaactccatcttaaaaaataaatgaagtgtggttgacatgatatatctgacactgttaacttactctcagaagctacttcttgtgaaatcctaagtacagcattattctgggaagcaaaggagacaggcataagcaaggagaaattaagagaggtaagagtctcatcatgattgatagtcttgttctgacatcttgagaaaagctgtccacagtgtaaagtcatcaacttgttgtcgtggtttgcagtttgagtgtctctaagttatggtgttgaacatttggtgagcttttagtggcccacacctcagacacgagggttttcccatgaaatttacattgagttgtccacctccagcttatatggcttcaggaacagagctgctcttgttcttaatgatttcattggagaaaattgaattggaagaactaaaagaattcagggtccagtccagtctaccagtggattataaatactcaaagataatgaacagtagtggttcaatctggtaacaggtgtactacagtttttcttttcaactagtttttctctctataggagtctctaattttaccaaagataattccagtaggatgaatttgtttgcaaaataggttgagtctcaccgaacttgcccagattttttacctaagtgcggcaagagtagccgtggaccatagaggctctttttaaacgtccctttgctagaagtttttaataagaatctcagatgaaacttccaaaaacctcttgagactaggaaactaaaccaagaccaacttcagactttgcctgctttccctatgggtttattctaggtatattatcaaatataacatcccagtaaaagctttggtaatataaccaatgttttcaaatgtgtcctgttataaagagagcagattcttactgaacttgtgcaaataactttattaccataaacctatgaatactcatgaatagtttcccaattctggggcactcagatagagagcaaaagcaaatgtttcaatttttgtttacaaaagtatactttaccaattgctgaagaaaaaaagttcataaatctggagaataaaacattccaagaatcagcacattttccaataaaaaattatgaaaacattatccttttgattatttagtccaataacattgagtttttttcttctttgtcttgaatttcatgaaggtatcaacctgttctttttctcagtgtctctattgtggcagccattaatgagactctgtctggtttccatggcagggacctgattgacagaaggcccaggtcagcgcatttcaaattcactacctcctttacagagaaagcttctttcccacaggctcccagcaagggtgtgaaagcaagtctagttctccgaggctctctttaactccaatgggtgactggttggaggattcctcatcagccttgcaaaaactcttagaactgcattggtacctaaaacttctttctctttctttttcacaggaatcagctctgcatagcggtctgtgggttctcccatactaccttcatgcctgccccacattccctcacaggtgtcttccctgataaattatcttgtatgtctaatcccatcttggatgcatctcagttggtaaaaactaacataccagacttgattctttgcacttagctttttttctttctctcccacaattagtcagtaaccatgtcctagtgttttatgtgttaccgcttttttcatatctatggaaaaaggtaggtactgttgaggtgcactttctatgtgccaggccctgtgctcaatactttacctgtatctcatttaatccacacaataaccctgtcaggtaggcattatttccattttgctgatgaaaagacagaagcttagcatggtgtaaaaactttcctggtgtcatatggctagtgacaggtggatctgagatttgattctaggactatttgacctcaaggctaatgatgatggtagtaatatagcagctgacattggttcctctttgtgtggcatcttgtttcattgactgcattaaacctttaaaagaatggtatgaagaaagtactcttattgcaattttcaggtgaggaatcaggggttcagagaagttgagtcttgtgcaagaaatttataactgtaaactcttacattaaaaaagaagaaagagctcaggtcaacaacctactttaatacttcaggatacgaaagaagaacaaactaaacccaagcacagtgaatgagggaaataataagtattagggtggatataaataaaatggagaatggaaacagaatagaggaaattactgaaaccaaaagttgattcttcaaaataaaatcaacaaaattgacaaccattaactagattggctaagaaaaaaagagaaaagataaaattactcaaatcataaatgaaaatggactctgagcatggtgggtcatgttttaatcctagcactttgggaggtcacagcagaaggatttcttgaaaccaggtgtttggaccagcataggtaacctggggagatgctgtctctacaaaaaaaaaaaaaaccaattagctgggcatgttgacatgcacctgtagtcctagcatcttgggaggctgaagaaggagaattgcttgagcccaggaggttgaggctgcagtgagccataatcacaccactgtattccatcctagggtggcctacagagtgagagcctgtctctctgtcttaaaagaaaaagaaaaaagaaaaatgaagcgattactaccaattctaataaaataatgattatgaaagtactataaataattgtatgccaataaattggataacctagatgaaatagacaaactcctagaaacacacaaaaatatgaatataactataatcagtaagaagattgaatcaataaaagcatttgatgaaattcagtattttttcataataaaaacattctaagaatggaaggcaaccacctcaacataaaggcaatatgtgaaaaacccaatgctaacatcttacataacagagaaagactgaaaactttccctgtatgagcaggaaaagacaaggatgcctgctattgacacttttattcaacatagtagtgaaaggtctaatcagaaaaattagggaagaatttttaaaaagacattcaaattggaaggaaggagtaaaattatttctgtttatagataacttgaacttatttgtagaaaatcctaaagatggaacaaacctattagaattaataaattcagtaatgttgcacaatacaaaatcaacattcaaacatcagttgtatttcaatacactaaccatgaacaatctgaagggaaattaagaaaaataatttcaatttatattcacatcaaaaagaataaaatatttaggaataagtttaaccaaagaggtgaaatgattatacctgaaatctacaaagtattgctgaaagaaatgaaagatgacatcaataaattgaaagacattttgtgttcatgaattggaagactcaatattgttaggaggacagtgctgcccaaagtgagctgcagattcaatacaattcctatcagaatctcagtgacatttttgcagaaaaagaaaaatctgtcctaaaatttatattgcatctcatgactctaaatagacacacagctttgaagaggaagaatgaagctggaggactcacacttcctgatttcagcatttactacaaagccccagtaatcaatacagtgtggtactggcataaaggaggacatagaaattaatgaaatatcatagcccagaaagaaatgcttgcatatatggccaaatgattttcatcgagtgtgccaagatcgttcaatggggaagggacagtgttctcaccaaatgatattgggaaaggtggatatccaagggcaagaagagtggaacctttacctaacaccatgtacaaaaattaacccacaatagatcaaagatctaaatgtaagagtaaaaactatacaactcttagaagaaaaacttcatgatagtggatttcacaatgatttcttggttgtaacaacaaaagcataggcaacaaataaaatggataaatcagacttcataaaaatcaaaaccttttatatagcccatgcaaagttcctcagcatcacgaatacttagagatatgcaaatcaaaaccacaatgttacaacacctcacacactttaggatggctttgataaacaacaacaatgacagcaacactaaacaacaggtgtttccaagtagatggaaaaattggagctctagtgcattgctgatgggaatgggaaatgttatagccaatgtaaaaagtagtgtggctgtttttcaaaaaattaaacaataaattaccatttgatccagcaattccccttctggacatactccctatagaattgaaagaaatttgaagaaatatttgtacactgatgtacagagaagcattactcacactagccaaaaatggaaacaactgaaaagtccattgaaagataagtgggtaggcaaatgagatgtatctatacattgaaatgttattcaaccttaacaaggaagaaaattacaatacatcgtgcaaaatggatgaaccttgaagatattatgccaactgaaataagccagacacaaaaggataattattatataattccatttataaaagatagttagaatagccagttacatagagacagaaagtagaatggtgggtgttaagggttagggggagaaggagtgagagttactgtttattgggtacagaggtttaatatggtaagaggaaaaagttctggaaatggatagtgtgatagttacacaacactaaattgcacacttagttaatggtaagtctaatattagatatatataaagtgtctcgtggtcttgccctctctataattacacactttttggcactgcccctttcctgccatgcagagccccaggggtgaatctccctatttctctagctctgcatcagtcactgtcctccgtgctgtgtcccacgtgctgtgcccaaagcctcatacagctggtgacttcagagccaggatgcagctcaggagtcagccctgaagctccctctcttcttatttccctgcagcctggcccgggggaggcttggcttcaactggcagctcgatttagccaacttcaggacaggccaccagggccctttctccacacatgttggttccaccccaggtggagtcaggcagggccaggccagtcaccagaggagcccggagcagagcaggaagcagagtctgagctgctcctccctcacccaaagggcttcctcctctcatttgggggaaaagtgtgagcttgtttcaaagcctcagatgttccttgtagctcatggaataggtacaagaaaacaaagacatggcagaaggggatgtgttcgtgacagcgagaagcaacttgatcttgaggactctccttcttgtccctctgtgaagcctcttctaccacatagggctcagggctgataaagccccctccctacctttctcaggccagacacaaggtcagccatgagaaaacagaaaaacaagcagaagagagtctgtagagataagttgggagggttcaggaggagaatttgggatttgcttgtgcccatgggacacagtctgggaatacaaatgttttcctgactcttctctgaaagccagatagactccacctaaaaccctattgccaaggatgctgggatccacttaccagagactttgactatcatggatttggagatttccttgccagtggctgagttacgaacagagcaagcatagagcccgctatgatttgtagtaatttgggggataaagagcttttgtcctgatagctgaaacttcccattaattgtccaagaatactctgccggtgggttagagtccgcaaagcaggacaagtcgaggttttctcctgaacggtaataggtgaatgaagggtaaattctggggaggtctggaccatctggaggaaagagaataaagccacaggtgatgtcatccaagggaaggggatgctcctggtctcttaaagggacacagtgaccctctgaaccaagacacaacctcaagtgacagccaaatcccatctatgtttactaagcccaagcctgaggtattcccctgtttctctcattacaagctgtgggcccctagtgtcccatgacaagagcgcccctccccttatattcttggttaaggctgtgcctacccaggatttcccagggcagggagtcatggccaggtctgatgtccagaagtaaagttgtctatacttggaccggagagagactgagaggcctggcctctggtcgtttggagttaagctggtgtcctggcccacagaggaacaaaggatactcacagaggacattcagggtgactgggttactgcggatgccaccatatcggtcccgtatttcacattgatagggtcctgtttcatttctcgtgacactgggtagaatgagtatcctgttttcaatgggtcgctttaccctcggactgaccgggaggctctgaccatttagccaccaaatgtaggtgtagttccgactcttaggttcacaggtgaaggctaacacatccttcttctccctggggtttaagttgttgatggtgatgtaaggcatgggcagcttcgctgtgtggataacagaagattgtcctgtgtggcacctttgattcctccacaggcatccttcattcagagttggcatctcccacctgtcaacccacatgagtccttgaaagccagtagctggtgcatgtgtcacaagacagatgtatgatgatctaagggctcaaagactgtgaggcctcctgctctgtcttagggaagcacagactttctcaagtgtcaattgagcagcagtgttgggtcatggacagacacgtcagtgggagtcacagcccctggtacccctcccagtccctccataatcagttgactggctggctcaccctgggttccttacctggaatgtgcaactgctgggccccttccaaattacatcctactttgcccccctagatgtgatttctctgcagcttccatttccaaggacattctagagatgagtaataatgggacttcccattgtcctgaaaccctgcagatactgagcagcctggcctgggactggatgtttcagcagaaataacacagggaagaccagagtcaagcctgtaggtcagttcagtcatcaggcactagaggcaccaggtggggcagtttttttgcaggtgtttcatgatgacttacttgaaccagtgacctctaaagatagagcagagtgcaaggaatgatctagaaagagtgaaggggacaggcaagagctggtggctttggagcagaagcatgttccctgtcctgggttctttaagtttcctctccttctgcagagggcaggtgaggaccatgtggatctttctagaaatacatgtggacatttgcaaatgcagaactgagtggtggaaagggtgggaatgaactgctggaaatctagtcctcatggaccatgtgtgtttgatggatatgagacaaatttggagagaagttttgcaaatattttctttcattggacattctactctctgattccatgggttccactaatctagggacctcatgtaagttgattccagattgaatatgagacgaggctgctggaagccaggagctgggagtggggagaatcagaagttgttcatgggtgtgcagtttcagttatacaagttggagaggttctagagatctgctgtagagcttgatgcctatagttcacacagattatctcttatgcataagttttaggacaaaaagtgttttggatttctgatattttttgattctcaaatatttgtcatatacttactggtttagcatcccaaatctgaaagattcaaaatgtaaaatgcttcagtgagcatttcttttcagcatcagattagtaggcaaaagtgggaggtgataagccagatatattcttgcccttttttttctctcaccatgtttctagcttggtgattagttttcggtgaattccatagtggccatgctgcactcgtatatttttgaaggctttgggatgtgagaaaggctgattgctattttctatgtcatcagaactttccaccttttctggttgcttctttttctcagtgtttgtgttgtggcagtcattaagaagagcctgtcagctcagatttaggacagagttttctaaattctgcaaaaaatgttactgggattctggtaggggttgcattgaatctgcaactcaattgggtagtattgcctttctaacaatattgcttcttccaatccatgaaaatgaaatgtgtttccatatattgatatcgtctttaatttctttcagcaatgttttgtagttttcagggtataatcatttgacctttttggttaaacttattccaaaatattttattccttttgatgttaatgtgaattgaaattctttccttaacttcctttcagattgttcattgttagtgtattgtctaaagaatgatctagaaagagtgaaggggacaggcagaagctggtggttttggagcagaaacatattccctttcctgggttttgattttccctctccctttgcagagagcaggtggctcttccctgacagctagatagactttactggaaaacatggtgccaatgctccagggatccacttaccagggactatgatcctcttgattatgagatttgttccaccagtggctgagttatggatgaaacagacatagacccctctatatgttttagtgatttggggtataaagaacacttgtgctgattgctggaacttcccatcaatcagccaagaatgctctgccagtgggtgagagtctgtgaggcaggagagcttggggacttcccctgtatggtaataggtgtatgaggaagaaacggtgggagcatccaggccatgcggagcaaagagaataatgtcacaggcgatattgtcagagggaagggaaaatcctggtctgtggaagggacacagtcacagtgaccctgtgagccaagttgcaacactgaagtcccagccaaatccccgctgtgttcactgatctggagcctgagacattcacctgtttcttccatcacaagctgtggaacctgagtctcccatgacaggagaagcctcttctctcttattgttgatcaagcctaggcctactctggtttgcctggagcagaaagtcatggccagctttgatgttcagggataaaggtctctgtacttggacctgagagggactgagaggcctggcctctggccacttgtatttgggatggcagcctggctcacagaggaacagaagatactcacggaggagattcagggtgactgggtcactgcggctggcactcactgggttccgtatttcacattcatagggtcctgcaatatactttgtgacaccaaatagatagagggtcctgttggttttggacagctgcaacctgtgagtcatagggaggttctgaccattcagcaaccacaggtagcttgcatccggagtctcaggatcacagattaagcgcacagcctccatgacctccctggggtttaagttgctgctggagatggagggcttgggagtctccgctgtgcagaaaacagagagaagattgccctgtgtggcacctttgattcctccaaaggcatttttcaatcagagttggcatttccaacctctcagcccacccaagtccttaaaagcccatggcaggtgtgtgtgttacaagacagatgcatggcaacctgagggctcagtgattgtgaggctgcctgctttatgtaggagaagcatggactttctcaaatgtgaattgagcagcagcattgggtcatggaaagacacaggaccagcagtcacagcccctggtgcctctctgagtccctccgtctccaactgcctgcctggcccaccttttggtccttacttggggcatgcagtgctggaatcttgttagtttcagtctcactttgccccctgaggtatgttttctcatcagcttcccttgccaaggacatcctagagatggatgatggaacttcccattgtccttaagccctttgggtattagaaagcctggcctggaactgggtacttcagcagaaataacacaggggagaccagagtcaggcctggaggtcagttcagtcatcaggcagtggagccacaaggtggggcagttttccaggtgtctcatagtgactgagttgagccaatgactctaaagatagagcagagtccaaggaatgacctacaaagagtgaaagggacaggcaagagctgataggtttggcccaagaccatgatccctgttctgggtccatgatgctcccttccccctgtagagggcagttgaggaccatatggatctttctagaaatacatgttgatgtttgcaaatgcagaactgactggtggaaagggcaaacatgaacagatgacagaagtctggccctcagggaccttatgtgtttggtggatattagaccaatatttgggaagaagtcttgcagatactttctcttattagacattctactctctgattctgagtttgactactctatgtacctcatatcagtggattccagagggaatcagagattagaatagtagtttgcagcaactgaaatcacgggtatagggcgttgttccgtgggtgtgcggtttctgttatgcaggatgaggaggttctagagatctcctgtgcagcctcgtgcctatacttcatgcagatacagtgctccttatgcagaaagcttaaaacaaagtgttttggatttctaattttttttattttggaatatttgcagtatatgtactggtttagcatcccaaatctgaaaaatttaaaatccacaatgcgcgagtgagcacttctttttagcatcacatcagtggtcagaagtgttgagttttgagcatttcagattgtggatttctggatttccgatgctcaatttgtaatactgtaattttcccataaaaagttgtcaggagtttagacctcatgttatattctgactctagtaacaaaaaaaatttggaggaaaccttaaaatgttttcataagtggaaatttttactgatggtccaaacatctaagatcaattgctggtagtcatatttctcttgagaccaaaataaggtttaggtgtgccatgaattccagcaggatcacattatgctcaaagaaagatgccaaaggtgatttgaaattagcaactccttaagtagagagagtcctgttaaaaggaccgaactggttagtgtgtcaattacataaaaggaggaaggatgccaaattaaaagaagtgatgtgtgttatgttagtaaatatagaaagaacctgcttctaatttctgtgcagagttacaaaacatggggaggaccccaaaacaggtatgtgaaatgtcttcttcattttctcttaaggtcaggaaacaccactaaaatttaagtttgtgtgaattaggaagagtctaagtgagatgccaatggctcttgtgtctccccacacgaagaactccaacttatgaaaacggcatcatcatgaggaaatagttgtatgtggcacaggcagtaaaaccatgagataggacctacctggccacctccatctggtccccaaaccacaagtattcccgttaagtgtatgtgacagcctttgtagttgtcccacaactacaaaatttaaaaattgctattgtcaaaacaaaatattaaatatgaagttgaatatgttgttccgctttttttccccactctttttgagctttcctgtttcagttttggaagtttctattgacacattctcaagctagggattctttcctcagctctgtgcggtctatcagtaagcatcaaaagcattcttcatttctctaacagcatttttttttctgagacagagtctcgctctgtcaccccagctgcagtggcatgatctcagctcactgcaagctccacctcctgggttcatgccattctcctgcctcggcctcccaagtagctgggactacaggtgaccaccaccatgcccagctaattttttgtatttttagtagagacggggtttcaccatgttagccaggatggtctctatctcctgaccttgtgcccgcctcagcctcccaaagtgctgggattataggcgtgagccactgtgcccagccatctctgaaggattttaatgagttgttgacttttgagtttgttcagctttttacttagtgttagaaccgagtgacaaatttcaagcttgttttatgcctgacaggaagccagaagtctctagaaagtgaccggagaatgtgagctccatagcaggttgaggatggagtcactagtgaaatgggtgaaatgagcctatgggcttaattgctcctataattgctcctatagataacatcactattgtagaacgtgagattggtcttttgaaatgtttctcattcttttgccttctgacaaccggctgacctcatccatacctatgcctaatggctcagccagtcatgtggcccctacctagaggcagattcaagcactaacagatcatttccctccgcccgcatgattccatcaccaatcagcagtactcattttttagtcctgtgcccctgaaactatccttgaaaatctctaacacctgatccactggggaggctgatttgagtaataataaacctccaccctcctgtttggcagacttggagttcttaaaatctttctttactgcaaaccaccatttcaataaattttattttattttatatttttttgtgtgcaggaggccagaggaacttgtctggcaattacaagggtggatgggggaactgcctatccctgtcccatggtcttgtccacaggtcagcctcacaaagggaaagagccctggatgggaatacagtggaaggtttctcttagtgacctggggacattggctcgagaggaagcctggcaggagtggcaactccaggtgatttctgcacctttcctatttcctgggaggtgggccaggccacagtgttagcgggaagggaacagaacagccagcctagttagagggagtgtctggggaaggcctagggttggaggaagaagctgtgcaggacagggcttgccagtcagaatgaagtgggaggaagatgagggacacagagaagcagagagaggcagagacaccatggcagtgagcagtgagggagacactgacttcaaaaaccccagggaccaggtgcccccagctccacagtccaggaccaaagagccctgagaaccctccggtggccaaagaacttcagagttgcatgaggtggggtggctttagggtcaagaggtagtggggggatgaaacatgggtgtcagcctctgaaggacaagggacaggtgtggctagaacctcctaggattctgattccaagatccagtctctaaagaggttttggatcatccatttcttcattccattccttcatttgttatgtgagagctcctgagtgtgtctctctcactgggcctgtgctgaggcagggtgtgagtggggaaagaaaacaaggtcctctccttgatcctctcatgacggtgacatggacacttgggaaacacaggatttcacattcagtgatggaggttaagatctgagggggagacctggacattttttttgcactgactctggcggttgaagccagtgatttagttctggagtacagactaatcagctgaccatttgctctcactcctctgaggtttggatgcctaagaagagaggatttgagtcaataaatgactatggggtccttggaacccagtaagccctcacttctggtagaggagaggatgggcctgtggctgcagacagacctcatgtgaccccgatctcccctttgtgtttgtgtgactgtggctcagtgactgtgccttcctgtgcctcagttttctctcaatcaaatgagctaaatggcaaatggactgtggcttttcatgctatctgtgaataaatgttaaagtattcacagtcaactgacttaatgcttggcacagtggaggtgttcacacaaacagcatttattattaatttgcttccatgagaaagcacctttgcgtcagatccctgtggacaaacggctacctggtgcatcttctctcttctgtttctgcttctggggatattagactttctatggagtgtcctaggcctcctaaggcagttggctgatggcctacaaagcttgtctttctgtcctctccactctgagtgtcaggtgaagaaagctctgtccttgcccagatgaggctctgaggactgagccctggctggtgaacagctccaggagacacagtcctcagacagctggtaaatccttggtcccagtaagccctgccaaagaagccacaacccagtcctggcacaggctcctcagctttacctggagcaaggatttagggacaggggtctgggattgaggcttccagagctgaggttctctgagggtatctcagtgggcccctcaggccaagccctactcagttttccagggtctttctcagggtcaaatttatgaagagggcatgaggtgcttggctgagactgatctcctcctgctgagtccccccatcagactgtccttcctctgcagcgagtgtctgcagggtctggatgcgggaaaggaattctgatctgttgaaatgtgtctcctctgtgtgtgtcctgcactaaatgcccaaaccccagcatgggacataatgcagagagtgacacaggcagagtccaggcctgacaattctgtgtgtgtgaagtagaaatgacccctgccccccaacacccagggatcatgcggaatcactcacagtataaggtgacagtgaaatatccagttactcctccagtcccatcgcctcgctttatgatgtgtaaggtgtaggatcctgcatcctcctgtgtgacattctggatcagcagggatgcattggaatatactgtttctcgtccactgtaggcaggcccatatataatttgaccgtgtactacatatgatgtaatgtaatggtagaggtccgtcatttgccctttgtaccagatgtagccagtaagattctggggcaaattgtggacaagtagaagaacatccttcccctcggaaactttgggtggcttggcttcaattattacttgggcagtggtgggcaggttccagaagtttaaaagtgatgctaggaggtagagacagcatcagttaatatttggacctatgtattggggtgaaaagatggggccctgtgtcctgagaaggtctcttcaatcatcagccttgaagatatgcacacacacacatacaaacacacacacacaaaagggcatgtgtgtttgtgtgtgtgtatgtgtgtgtgtcctactgtcctactaggtcaaggtcagcagcatgacccccattccttcaacactcctgaccttggcatttttctgtttgcaatcctcttccccaggggtccgcacggccccctccacactgccctcaggtcctgctcacatcagggcatccttagacttctttcctgatgcctgcttcagagaccctgggtcttccctttctgacctttccctgctctgctccctctagggttcttgtcaacacctgacctcacattctatatctctttgcatgtctgtcttcctccccatgagagtgtgagctctgtgaggacagagacttttgtcatgttggttgcaccccagtgcctggaacaggatgcagactcctgtagatgtgagagttctcagggccctccatgccctgggtgttttttttcccccaattgttgaggttttttgctgaggaaagtgtttcatgccctggttacatttttatttgaggtgtcatctgatatagtcattattatcatttttcaaaatgtggtggcccctgatgattaatcaggaaaacagaacacttaagattttactacctcttaccaattccggttcaatgtgactttcctattttgacccctgtccctctctggtgtattttcccctatccaggctccaacagagccttctttccctttttttctttcttctttttattcttttttttttttttttttgaaatggagtctcgtactgtcacccaggctggcgtgcagtggtgctgtctcggctagctgcaacttctgcctcctgggttcatgtgattatcctgcctcagcctcccgaaagctgggattacaggagcacaccaccatacttggttaattttttgtattttttggtagagacacgtctacactgtgttggccagactgatcttgaactcctgatctcgtgatccacccacctcagcctccctaagtgctggcttcttttattttttagaaccccatcctctccaggataccccatccagtcactctgcttcctcctcctgtcctctcccaggaagtcctctcctcacctgtgagcaggagccccttccaggtgatgtgctgagtgcagggaggggctgagaggggtcccatggtctctgctgtctgtgtgttctcccctgtggagatgagcctaggatccagagacttcctgagcagggctgtcaggtgtgctgtccttcctccttctgtgctgagcctcttcccagggcagaagcacttctcaggctcatgggcggggtcaggcccaggacacctctctgtcccctcctctctcagtcctgcctccttgtccctccttctgtttttccttttgtctgtgtttcaggtccctgggaattgtggaggcctctgcctttttcagcagtgattctttcaccaaacctcaacacacactttgtgcagacacacacacacacacacacacacacacacacagacccacacagtgacacacataccctgcaggttgggcgaggacagtcctgggcctcagcctcctgctgtccccatggctctgggtcggggtgcacattcatgccatttgccctctttcatccccatctggctctccccttcagtgcaggaggctggagctgcaccaggtccctttcacagtgatgtcccattgtgctgtgggtgagctgtgtgttgcctggtgagagggacccttcctttttctaatcgtgtctagcttggctgcagcttccaaggatggtcattcaggacctgggtgtcccagaggaaactgtccttcctggaggtgtgcagggtgaatctctcatgcctcttgggaggagaggcctgtgcctgttgctcagtggtggctgtgagtcccatagtcaaagggaaagttctcggtcactgtatgactccgtggggtccggtggctgagctggagctcatggtttctcatgttcttcctgaccatctttgatgtcctctcttctctgcccagctgattgtcctgtggtcaccacagcttctccgtggtggtgcagaaggaagtgaggagttaaacaggaacccggtgggacatggctcgttgagacgcaggagggggagcctgggtcggagcagagtttcagagctggagagattcatcccgaccaactccgtggcaatgttgggcagagcctttcatgtgttgacatacccaggggtctgtcctgagggtttttgacctggccaagctgctgtgtgtagaggaggaacaggcagtggccagagatcctgtctggagggacgttgctcacacctgagcgggcgggtggggggtgagttgtgttctgggagcaaagagcaataacatcccccttctccccgcaagcacacaggagaggtctgtcttcccaagggacagctggggataggtggccacacctcggatggtgcctgtgtgtgaccatcacacgcgctctgagccccgtggggtgcagcgtgcaggcaggtcacagggtgcctggctgattcccggtgaggctgtgggccctcaggcagccgctattctgtgtcagcgctaagcttggcctgggatgccccagggaacaggacagatggagcaggggcgggcatttagggagcggtgacagaaagagttgatgaggatggagggaggtcacgaggggaaagcgcccagtgtggcatcgcgtgcaccagcgctgccctgggagatgcctttagctgggcccagggaaggagcaggtgtgtggggcaggagctacctgcagagggcgtggtgttaggttggtggcccccaggtcagggaggagctgacagagtccgtgtggggagcatggagggcgctgaggacttaggccgaagtgaccctggtgagggtggacactgctgggctgtgggttccgctgagggaggttggcttcccctgggaaggctccaggctgggagggactcggtcaccctctggtggacagggagggaagtgtgaacggcagcaatcccaggccaggctgcatgttttattccacgtggatctgcacacttcacacgaggtaacacgtatgttatgttacagctccttcaccttccagccccgtgagacccagtctttgtggctgtacgttcactgttctccctctttcacagtcagatgtcccaaaggcagatttttgtcacctttgtgagtttgtgtttgtgtgcagtaggtggcactgtgtataccctgggagcagtgatgtctggggctgagcagtgcacgtgggcttgggagcagaagagggagcagcagcgtgggaagatcaatgtcagaggggcagggacaagtcattttcattttctcactcccagggaccaatcccaggattctgactccagggcacagtaccacaccctgcttgtgtccctggatgtcatgatgctcatagtgtcatgttgccttggcattcattttttaaggtgtaagtttatttgcctcaaatcagaggcagggcttggtcaccatggcagttttcaatactgtatctggttcaagtggctccagttggtggccagagataaaatcttagaggtatctctcctgcttggtgtgctgggctcacctctctccagctgctttctttaaactgataattctgacatttgccctcacatttaaagtgaccacctctcagtcacagcttgagctcctggtcccagtgtttgctgcttgctttgaacacatccattaaagctccctgctggaaacctgtcagataacaccctggacttaataaaggcattggcttaccggtctcttctctcctccctgcctgggctcactgacctctgtgtctgtggcctccaggtgtgctgagtgctccctagtgtctgtaagtagtaaaaatacttatattttcacgttcttgttatatcattatagcctcacatgccatccagggcctgacattgaggctgccctatgggacttgtgctggttgagcttctgctggagctcttgttttggggcctctggttctcctggggacaggagcttccagctaacttgattgaaaacctgatgcctttcattggaacactgggtcaggtgatgtattcatgggcttcacctgccataacataaccttagcctgggtgaattaaataatagaaatctatttttcacagttctgtgaataatgtgctattttaaccactttaaaatgcacaatcaagtgaaattaaccacatacaccatgttaaattaccatcaccactatttttcctagaaaatttttatcattttaaactgaaactttgtcacttttaaacaatacctccctgtatgttccaccctagaccttgatcatctccactctctctctatgaatttgcctattcttgatgtttcatataaatggaattatacaattatgttattttgtttctgacatatttcacttagcataatgtttcccaagtccatgcatgttccagtgggtgtcagagcttcattcctctttatggcaggttaacaatctgttgtatgtgtcaccatatttgtttattcatgtgttgatgaacacttggattattttcatattttatcttttgtgaataatgctgcaatgaacattcccatgcaagtacctgtttgaggccctggatttaattctttgggtatgtacctaggaatgcctgttgtttcaaatgagaattctatgattagctttttgaggaacagcaaaactctttctccaagtggctgtaccttttcatattctcaccagccatgtatgaggattccaaattctacataatgctgctacttgttgtttaacattttaaaagaatggtagccagttttgtaggtgtgatgtggtgtctcattgcagctttgactttgtattttcctaatgactatagatgttgagtatcttttcatgtccttcttgactatttgtatatcttctttgaagaaatgtctatatgagtcttttgcccatttataaattggatggtttgtccttttgttattgagttttagctagttctttatattaactggatatgaaaactgcctatatgtggtttgcaaatattttctttcattcttttctattaattattttcttgataatttcctttgatgtacaaaaggctcacatcttgataaagcccaacatatcttgtttttcttgtttctcatgcttttgtatcatatctaagaatccattacacatttgagttcatcaatatttacctctatgtctagtttaagatgtttttatggttataggtcttatattttactcactcatcaattttttagagaattgtttgatatggtgggaggcagagttatctaaattcactgttttgcatgtggttatctagttgtttctgtactatgatttgaaaggagaattgttcatccattaaattgtcttgacaccctcttcaaggagtaattgaccataagtttgagggtttatttctagattcttaattctatcccatttgtctttatgtctattcttttgccagcagcttatgtctattctttggcagcagcttccattttaataattgtactcttttgtgagatttcaaataagaaagttcaagtcctacaatttattttggcaagattgttttagctactcaggggtacttttttgaaaggtggggaggccaatgtttcacaattgggaaagccttttctctcttcttcagggggaaatttgggagaagcttttaagaaactttatctaagtaggtaaactgtcaccactttatttgctgaagtgctatgttaaagtgtgcattgcctcttgtggaagaattatgagaccctggaagcacttgcccatgtggtgagagacagtgaattccacgatgaggggcagagaggacattgttttgggatacagtgttgttgggggagttgtatacatctcaacttctttatgtctctgtacagtgggtgtagggagcagccccacagggtcgttgggtttttctccctgtgtgtggagatgagagattgtggaaataaagacacaagactaagagataaaagaaaagacaactgggcctgggggaccactaccaccaagatgcggagaccggtagtggccctgaatgccaggctgcactgatatttattggatagaagacaaaggggcaggataaggaatgtgtgccatcttcaatgataggaaatgccacctgtgtcacatgtccactggacagggggcccttccctgcctggcaggtgaggcagagagagggaggagaatgagagagagagcttacagcattatttctgcttattagagacttttagtactttcactaatttgctactgctaactaaatggcagaaccacgtgtacagtatggaacatgagggcggactaagagtgtgaccactgaagcacagcatcacagggagacggttaggcctctggataactgtgggtggacctgactaatgtcaggccctccacaagaggtggaggagtagagtcttctctaaactccgccggggaaagggagactccctttccggtcggctaagtagtgggtgtttttccttgacactgaggctaccactagaccacggtccacttggcaaagggtgtcttcccagacgctggtgttaccgctaggccgaggagccctctagtggccctgtctgggcataacagaagccttgcactcttgtcttctggtcacttctcactatgtctcctcagctcctatctctgtatggcctggcctttcctaggttatgattataaagcgaggattattataatattggaataaagagtaattgctaccaactaacaattaatgatattcatatataatcatatctaagatctgtacctggtataactattcttcttttatattttatgatactggaacagctcatgccctgagtctcttgcctcagcacctgggtggcttgccgcccacaagtgggcatctccattggacacagtaggttttgaaatccttgtttatcctctggggtctgggtcttggcttacctattagctgcaactgaaagaggagtctgttaagtcaatgactcctgtacggagtagaaggtttcagcagagtgaaagtagctggggttcatagaagccaggaatgtctgactcttagaaactgtgtgtcagcagatgggtgtcctcaggggtacatgggccatgccagtagccactgcagtggactggaagaaggtaagggatgctgggtatcccatgttctctctcagctctgcagctgaagatttgggccctgggcttgtacgaccctgaagcaggggaagggtatacaggaatggctgcatatcaggaccaagtccatgtcatcttctgaggcattgttactgcagatggaggattctgttcagagaccaggcctggacacatgggagggcccaccccattcttttaaaattgttttaagagaacagtattagcaaatgtagtacatgttttattctgctagaatcagtcttactgtcacgttttacaatgtatctcttaggaaatggtgagagccatccacacaatgtgcatttaaaggggagtctactataatttcagctttcctactctttatagaaaccatcttctctgcaaacacacaggcaatatctctgtgttcatttctattgggagccctgtatgcaagatggagagagccacatttcctcctgagatgttatgtaaaagtctgaggttgagatgacatatctgacactctgttgttaccctcagaagctcctatactacatgtgaaattctaatgactgcattatcctgccaagtgaaagaggcaggcacaagcaaggacagctaagaggggtgagagcctcatcatgatggggagtcttattctgacatcttgggaaaagctgtccacagtgtgaagtcatcaacttgttttccttgtttacagtttgagcagctgttgttatggtgttgaacattttggtgagttctgagtggctcagacatcaggtacaaggattttcccatgaaatttacattgagttgtccaactctgacttatagggcttctggaacagagtgggtcttgctctttgaggttccatgggagaagatggaattggaggaactagtagaattcagggtaatgtccagtctacagtggataataaaaacacagaaacaatgaacagagctgcaatctcataacaggtgtactacggttttattttccacataatttttctctctatgggcatctctagttttaccaatgataatttcagtagaataagtttgtttgcaaaataggttgagtttcttcaaacttggtctgattgtttacataagtgcagcaagagtagcaatggactatgtaggctctcttttaaaattttctttgctgtaagtttttataaggaatctcagattaaacctttacaaaactcttgagaataggaagccaaaccaaggctgacttcagagtttgcctgcagttcatactggttcattctagctatattcttaaatataacatcccagtcaaagccttggtaatataaccaatgatttgaaatgtgtcctgttacaaagagagcaggttgttactctgtttgtgcaaatatctgtattaccataaacatatcaatactcatgaatagttgcccaattctggggcattcaggtagagagcaaaagtaaatatttcaattatcattcccagaagtatagtttattgaaccactataagctagagatagattaaaagacaaatttccataaatctagaaaactatccacataaagaatcagcatattttcaaataaaaatcataaaaacattatcctcattattatcaattatttcaatgaaatcaatgtttttcctgcttggtctaggctgggaatgttatgaagatatcagcctgtttgttaaagttttcgaagttcttagacaaatttggagggttcaggaggaaaatttgggatttgcttgtgcccatgggacacaggctgggaatacaaatgttttcctgacttttctctgaaagtcagatagactgcacctaaaaccctattgccaaggatgctgggatccacttaccagagactctgactgtcacggatttggagctttccttgccagtggctgagttacgaacagagcaagcatagagcccgctatgctttgtagtaatctgggggatagaaagcttttgtcctgatagctgaaacttcccattaattgtccaagaatactgtgccggtgggttagagtccgcaaagcaggacaagtagaggttttgtcctgaatggtaataggtgaatgaagggtaaattctggggaggtctggaccatctggaggaaagagaataaagccacaggtgatgttatccgagggaaggggatgctcctggtctcttaaagggacagagtgaccctctgagccgagacacaccctcaagtgacagccaaatcccctctatgttcactgagccgaagcctgaggtattcacctgtttctcccatcacaagctgtgggccccaagtctcccatgacaagagcgtccactccccttatattcttggttaaggctgtgcctacccaggttttcccagggcagggagtcatggccagctcggatgtccagaagtaaatatgtctatacttggaccggagagagactgagaggactggcctctggtcgtttggagttaagctggtgtcctggcccacagaggaagaaaggatactcaaggatactcacagaggacattcagggtgactgggtcactgcggatgccaccatatcggtcccgtatttcacattgatagggtcctgtttcatttctcgtgacactgggtagaatgaggatcctgttttcaatgcgtcgctttaccctgggactgaccgggaggctctgaccatttagccaccaaatgtaggtgtagttctcactcttaggttcacaggtgaaggttgagacatccttattctccctggggtttaagttattgatggtgatgtagggcttgggcagcttcgctgtgtgaataacagagagaagattgtcctgtgtggcacctttgattcctccacaggcatccttcaattagagttggcatctcccacctgtcaacacgtgtgagtccttgaaagccaatagctggtgtgtgtgtcacaaggtagatgcatgatgatctaagggctcaaagactgtgaggccacctgctcagtcttagggaagcatagactttctcaagtgtcaattgagcagcagtgctgggtcatggacagacatgtcagtgggagtcacagcgcctggtacccctcccagtccctcactaatgagttgactggctggctcaccctgggttcattacctggaatgtgcaactgctgggccctttccaaattgcatcctactttgcccccctagatgtgatttctctgcaacttccatttccaaggacattctagagatgagtaataatgggacttcccattgtcctgaaaccctgcagatactgagcagcctggcctgggactggatgtttcagcagaaataacacaggggagaccatagtcaagcctggaggtcagttcagtcatcaggcagtggaggctcaaggtggggcagttttttgcaggtgtttcatgatgacttacttgaaccagtgacctctaaagatagagcagagtgcaaggaatgatctagaaagagtgaaggggacaagcaagagctggtggttttggagcagaagcatgttccctgtcctgggttctttaagtttcctctccttctgcagagggcaggtgaggaccatgtggatctttccagaaatacatgtggacatttgcaaatgcagaactgactggtggaaagtgtgggaatgaactgctggaaatctggtcctcatggaccatgtgtgtttgatggatataagacaaatttggagagaagttttgcaaatattttctttcactggacattctactctctgattccttggggttgactactctagggacctcatgtaagtggattccagagtgaatatgagaagagactgctggttgccaggagctgggagtggggagaatcagaagttgttcatgggtgggcagtttcttttatgcaagatggggagtttctagagatctgctgtagagcttgatgcctatagttcacaaagatggagtatttcttatgcctacaacttaggacaaaaagtgttttgcatttctttcattttttgattctgaaatatttgtcatatacttactggttaagcatcccaaatctgatagattcaaagtctaagatgcttcagtgagcatttcttttcagcatcagattagtaggcataagtgggaggtgataagccaaagatattcttgcccttttttttctctcaccacgtttctagcttggtgattagttttcggtgaattccatactggccatgctgcacttgtatatttttgaatgccttggcatgtgagaaaggctgattgctattttctatgtcatgagaactttccaccttttcatggttgcatctttttctcagtgtttttgttgtggcagtcattaagaagagcctgtcagctcagatttaggacagagttttctaattctgcaaaaaatgttactgggatgctggtaggggttgcattgaatctgcaactcactttgcgtagtattttctttctaacaatattgattcttccaatccatgaaaatgaaatgtgtttccatatattgatatcatctttaatttgtttcaggaaggtttgtagttttcagggtataatcatttgacctttttggttaaacttattccaaaatattttattccttttgatgttaatgtgaattgaaattattttcttaatttcttttcagattgttcattgttagtgtatagtctgaagaatgatctagaaagagtgaagggtacaggcaaaacctggtggttttggagcagaaatatattccctttcctgagttttgattttccctctccctctgcagagggcaggtggctcttccctgatagccagatagacttccctggaaaacatattgccaatgctccagggatccacttaccagggactatgatcctcttgattatgagatttgttccaccagtggctgagttatggatgaaagagacatagacccctctatatgttttagtgaattggggtataaagaacacttgtactgattgctggaacttcccatcaatcagccaagaatgctcggccagtggatgagaatctgtgaggcaggggagcttggggacttctcttgtatggtaataggtgtatgaggaaaaaatggtgggggcatccaggccatgtggagcaaagagaataatgtcacaggtgatattgtcagagggaaggtaaaatcctggtctgtggaagggccacagtgaccctgtgagtcaagtcgcaacactgaagtcccagccaaatccccgctgtgttcatgatctggagcctgagacattcacctgtttcttccatcacaagctgtggaccctgagtctcccatgacaggagcagcctcttttctcttattgtggatcaagcctaggcctactctggtttgcctggggcaggaagtcaccaccagctttgatgtccaggggtaaaggtctacatacttggacctgagagggactgagaagcccggcctctggccatgtgtatttgggatggcagcctggctaacagaggaacagaagatactcacggaggagattcagggtgactgggtcactgcggctggcactcactgggttccgtatttcacattcatagggtcctgcagtatagtttgtgacaccaaataggtagagggtcctgttggtttcagacagctgcaagctgtgagtcatagggaggctctgaccattcatccaccacaggtagcttgcatctggagtctcaggatcacaggttaaaatcacagcctccgtggcctccctggggttgaaattgctgctggagatggagggtttgggagtctccactgtgcggaaaacagagagaagattgccctgtgtggcacctttgactcctccaaaggcatttttcaatcagagttggcatttccaacctctcagcccacccaagtccttaaaagcccatggcaggtgtgtgtgttacaagacagatgcatggcaatctgagggctcagagattgtgaggctgcctgctttatgtgggagaagcatggactttctcaagtgtgaattgagcagcagcattgggtcatggaaagacacaggaccagcagtcacagcttctggtgcctctctgagtccctccatctccaactgcctgcctggcccaccttgtggtcctcacttggagcattcagtgctggaatcttcttagtttcaatcttactttgccccctgtggtatgttttctcttcagcttccctttccaaggacatcctagagatggatgatggaacttcccattgtccttaaaccctttgggtactggaaagcctggcctgggactgggtacttcagcagaaataacacaggggagaccagagtcaagcctggaggtcagttcagtcatcaggcagtgcagccacaaggtggcgcagttttcccaggtgtctcatagtgactgacttgagccagtgacctctaaagatagagcagagtccaaggaatgacctacaaagagtgaaggggacaggcaagagctgataggtttggcccaagaccatgttccctgttctgggtccatgatgctccctttcccctgtagagggcaggtgaggaccatgtggatctttctagaaatacatgttgatgtttgcaaatacagaactgactggtggaaagggtgaacatgaactgatgatggaagtctggtcctcatggaccatatgtgtttggtggatattagaccaatatttgggaagaagtcttgcagatactttctctcattagacattctaccctctgattctgagtttgactactctatgtacctcatatcagtggattccagagtgaatcagagagtagaatagtagtttccaggagctgggattaggggaatagggcactgttccgtgggtgtgtggtttcagttatgcaggatgagggggttctagagatctcctgtacagcctcatgcctatagttcatacagataaagtgctccttatgcagaaaggttaaaacaaagtgttttcaatttctaatttttttattttggaatatttgcagtacatgtactggtttagcatcccaaatctgaaaaatttaaaatccacaatgcgccagtgagcacttctttttagcatcacatcagtggtcagaagggttgagttttgagcatttcagattgtggatttctggatttgggatgctcaattcgtaatactgtaattttcccataaaatgttgtcaggagtttagacctcaggttatgttctgactctaataacaaaagaaaaatttggaggaaacattaaaatgttttcattagtggaaatttttactgatggtccaaacatctaagatcaattgctggtagtagtatttctcttgagacgaaaatgaggtttaggtgtgccgtgaattccagcaggatcacattatgctcaaagaaagatgccaaaggtgatttgaattagcagctccttaagtagagagagtcccgttaaaaggacagaactggtcagtgcatcaattacataaagagaggaaggatgccaaattaaaagaagtgatgagtgttatgttagtaaatatagaaagaactgcctgcttataatttctgggcagagttaggaaaaatgcggaggaccccaaaacaggtatgtgaaatgctttcttcattttctcttaagctcaggaaacaccactagagtttaagtttgtgtgaattagtaagaggctaagtgagatggcaatggctcgtgtgtctccccacacgaagaactccaacttatgaaaacggcatcatcatgaggaaacagttgtatgtggcacaggcagtaaaaccatgagatagcacctacctggccacctcgatctggtccccaaaccacctgtattcccattaagggtatgttacagcctttgtagttgtcccacaactacaaaatttaaaaattgctattgtcaaaacaaaatactaaatatgaagttgaaatgttgttccactttttttcccccactctttttgaactttcctgtttcagttttggaagtttctattgacacattctcaagctaggtattctttccacagctgtgtgcagtctaccagtaagcatcaaaagcattcttcatttctcaaacagcattttttttttctgagacagagtctctctttgtcacccaggctggagtgcagtggcatgatctcagctcactgcaagctccgcctcccggtttcactccattctcctgcctcagcctcccgagtagctgggactacaggtgcccaccaccacgtcccactaattttttgtatttttagtagagacggggtttcaccatgttagccaggatggtctgtatctcctgaccttgtgcctgcctcggcctcccaaagtcctgggagtataggtgtgagccactgtgcccagccatctctgagggattttaacgagttgttgacttttgagtttgttcagcgttttacttagtgttagaaccgagtgacaaattccaagcttgttatatgcctgacagaaagccagaagtctctaggaagtgacaaaagaatgtgagctccatagcaggttgagaatggagtcacgagtgaaatgggtgaaatgagcccatgggctttgggaactgcaggcccttccagcctctgacaccctgatgagtccgtgcaaagattacaacagtgacagcaaactagcgtggctgactccatctggcatctagtctcaggctggctgtcctcactcattcctggacataggccaggctatccttgggaagaatttggtttatggtttaactttgaagcaagaatgatgatagttcctccataaaactaacacccttactttgcccagggactgccttggtaaaactagtgaaagaccatgagatttagattataagagggaactgaattctgctaaaatgttggcacagtttctataatccctgactgctccagtgtcatttggcaagagtttacaaaatttgtaactaattgctcctatagataacatcactattgtagaacgtgagattggtcttttgagatgtttctcattcttttgcattctggcaaccggctgacctcatctatacctatgactaatggctcagccagtcatgtggtccctacctagaggcagattcaagcactaacagatcatttccctctgcccacatgattccatcaccaaacaatcagcagtactcattttttagtcctgtgcccctgaaactatccttgaaaatctctaacccctgatccactggggaggctgatttgagtaataataaacctctgtcctcctgtttggcagacttggagtcattaaaatcattctttactacaaatcaccatttcaatatatatatatatatatatatatatatatatatatatatatttttttttttttttggtgtatgtatgtgtgcaggaggccagaagaacttgtctggcaattataagagtggatggaggaactgcctatccctgtcccatggtcttgtccacaggtcagcctcacaaagtgaaagagccctggatggaaatacagtggaagctcattctcttagtgacctggggtcattggctcgagatgaagcctggcaggagtggcaactccaggtgatttctgcacctttcctatttcctgggaggtgggccaggccacagtgttagcgggaagggaacagaacagtcagcctagttagagggagtgtctgcggaaggcctagcagtggaggaagaagctgtgcaggacagggcttgccagtcagaatgaagtgggaggaagatgagggacacagagaagcagagagaggcagagacaccatggcagtgagcagtgagggctacactgacttcagtgaccccagggacaaggtgcccccatttccacagtccaggaccaaggagccctgagaaccctccgtggccaaagagcttcagagttacatgaggtggggtggctttaggggcaagaggtagtggggtgatgaaacatgggtgtcagcctccgaaggacaagggacaggtgtggctagaaactcctgggattctgcatccaagatccagtctctaaagaggttttggatcagtcatttctgcattcaattcctttatttgttatgtgagagctcctgagtatgtgtctctggctgggcctgtgctggtgcagggtgtgagtggggaaagaaaacaaggtcctctccttgatcctctcatgacagtgacatgggaactttgggaaacacaggatttcaggttcaatgatgggtgttaagatctgagggggagacctggacattttttttgcactgactctgatggttgaggcagctgatttagttctggagtgcagactaatcaggtgaccacttgctctcactcctctgaggtttggatgcctaagaagagaggatttgagccaataaatgagtatggggtgcttggaacccagtaagccctcacttctggtggaggagaggatgggcctgtggctgcagacagacctcatgtgaccctgatctcccctttgtgtttgtgtgactctggctcagtgactgtgctttcctgtgactcagttttctctcaatcaaataagctaaatggcaaatggactgtggcttttcatgctatctgtgaataaatgttaaattattcacagtcacctgacctaatgcgtagcactgtggaaatgttcaccaaacagcatttattattaatttgcttccatgagaaagcacctttacgtcagatccctgtggacaagctgctacctggtacatcttctctcttctgtttctgcttctggggatattagactttctatggagtgtcctaggcctcctaaggcagttggctgatggcctacaaagcttgtctttctgtcctctccactctgagtgtcaggtgaagaaagctctgtccttgcccagatgaggctctgagggctgagccctggctggtgaacagctgcaggagacacagtcctcagacagctggaaaattcttagtcccagtaagccctgcccaagaaaccataacccagtcctggcacaggctcctcagctttatctggagcaaggatttagggacaggggtctggggttgaggcttctagggctgagcttctctgagggtctcagggggcccctcaggccaagccctactcagttttccagggtctttctcagggtcaaatttatgaagagggcatgaggtgcttggctgagactgatctcctcctgctgagtccccccatcagactgtccttcctctgcagcaagtttctgcagggtctggatgtgagaaaggaattctgatctgttgaaatttgtctcctctgtgtgtttcctgcaataaatgcccaaaccccagcatgggacataatgcagagagggacacaggcacagtccaggcctgacaattctgtgtgtgtgaagtagaaatgacccctgccccccaacacccagggaccatgtggaatcactcacggtataaggtgaaggtgaaacgtccagttactcctccagtcccatcacctcgctttatgatgtgtaaagtgtaggatcctgtgtcttcctgggtgacattctggatcagcagggatgcattggaatatactgtttctcgtccactgtatgcaggcccatatttaattatttgaccgtctactatatatgatgtaacataatggtagaggtccctgatttgtcctttgtaccagatgtagccagtaagattctggggcaaattgtggacaagtagaagaacatccttcccctcggaaacttttggtggctgggcttcaatcgtgacttgggctgtggtgggcgggttccagaagtttaaaagtgatgctaggaggtggagagagcatcagtcaatattgagacctatgtgttgggttgaaaagatgggcccctgggtcctgagaaggtctcttcaatcctcagccttgaagacacacacacacacacacacacacacacacacacacacacaaacacacacacacacatataaaaggggcatgtgtgtttctgtgtgtgtcctactgtcctactaggtcaaggtcagcagcatgacccccattccttcaacactcctgactttggcatttttctgtttggaatcctcttccccaggggtccgcacggccccctccacactgccctcaggttctgctcacatcagggcatccttagacttctttcctgacacctccttcagagaacctgggtctttcctttttgacctttccctgctctgctccctccagggttcttgtcaacacctgatctcacattctagatctctttgcatgtctgtcttcctccccatgacagcatgagctccgtgaggacagggacttttgtgatcttggtcgcaccccagtgcctggaacaggctgcagactcctgtagatgtgagagttctcaggggcctccatgccctgggtgttttttttcctcccaattgttgaggttttttgctgaggacagtgtttcatgccctgcttatatttttatttcaagtgtcatctgatatagttattattttcatttttcaaaatgtggtgacccctgaggattaatcagaaaaacagaacacttaagattttcctacctcttaccaattccggttcaatgtgactttcctattttgacccctgtccctctctggtgtattttcccctatccaggctccaacagagccttctttccttttttttcttttttcctttttttcttttgggacggagtctcatactgtcacccaggctggcatgcagtggtgctatctcggctagctgcaacttctgcctcccgggttcatgtgattctcctgcctcagcctcctgagtagctaggattacaggagcacaccaccatacctggttaattttttgtatttttagtacagacagggctacattgtgttggccagactgatcttgaactcctgatctcttgatccacccacctcagcctcccaaagtgctggcttcttttattttttagaaccccatcctctctaggagaccccatccagtcactctgcttccttttcctgtcctctcccaggaagttctctcctcacctgtgagcaggagccctttccaggttatatgctgtgtgcagggaggggctgagaggggccccatggtctctgctccctgcgtgttctcctctgtggagatgagcctaggatccagaatcttcctgagcacggctgtcagctgtgctgtccttcctccttctgcactgagcctcttcccggggcaggagcacttctcaagctcatgggtggggtcaggcccaggacacctctctgtcccctcctctctcagttctgcctccttgtccctccttctgtttttccttttgtctgtgtttcaggtccctgggaattgtggagccctctgcctttttcagcagtgattctttcaccaaacctcaacacacactttgtgcagacacacacacacacacacacacatacacacacacacacacacacagaagagacacacacagacccacagagtcacacacataccctgcaggttgggcaagcgcagtcctgggcctcagcctcctgctctccgcatggctctggttaggggtgcacattcacgccctttggcctctttcatccccatctggctctcccctgcagtgcaggaggctgaagctgcaccaggtccctgtcacagtgatgccccattgtgctgtgtgtgaactgtgtgtttcctggtgagagggacccttcctttctctaatcgtatctagcttggctgcagcttccaaggatggacgttcaggacctgggtgtcccagaggaaactgtccttcctagaggtgtgcagggtgaatctctcatgcctcttgggaggagaggcctgtgctgattgctcagtgggggctgtaagtcccatagtcaaagagagagttctcggtcactctttggctccctggggtctggcggctgagctggagctcaggatttctcgtgttcttcctgaccatctttgatgtcctctcttatgtgcccagctgattgtcctgtggtcaccacaccttccctgtggtggtgcaggtggcagtgaagagttacccaggaaacccgcgggacatggctcgttgagacacaggagggggagcctgggacagagcaggggttcagagctggagagattcatcctgacttactccgtggccatgatgggctcagccctccatgtgccgacatacccaggggtctgtcctgagggttttgacctggccaagctgctgtgtgtagaggaggaacaggcagtggccagagatcctgtctgcagggacgttgctcacgcctgagatggtgggtgggggtgggttgtgttctgtgtgcaaagagcaataacacccccctttccccgcaagcacacaggagaggactgtcttcccaagggacagctgggggtaggtggccacatcccagatggtgcctgtgtgtgaccatcacacacgatctaagccaccaggggttcagcgggcaggcaggtcacagggtgcctggctgattcccggggaggctgtgggcccttaggcagccgctgatctgtgtcagctctaggcttcacctgcgaagccccagagaacaggacagatggagcaggggtgggcatttagggagcagtgacagaaagagttgatgaggatggagggagttcacgaggggaaagcgcccagtgtggcgttgcgtgcaccagagctgccctgggagatgcctttagctgggcccagggaaggagcaggtgtgcggggaggagctacctgcagggggagtggtgttaggttggtggctgccaggtcagggaggagctgacagagtccatgtggggaacatggagggcgcgctgaggacttgagccgaagtgaccccggtgagggtggaccctgctgggctgtgggttccgctgagggaggttggcatcccctgggaaggctccaggctgggagggactctgtcaccctctgttggacagggagggaagtgtgaacggcagcaatcccaggccaggctgcatgttttattccatgtggatctgcacacttcacacgagatcacacatatgttatgttacagctccttcaccttccagccccgtgagtcccagtctctgtggctctacgttcactgttctccctctttcacaatcagatgtcccaaacgcagatttttgtcaccttctgtgagtttgtgtttgtgtgcagtaggcggcactgtgtataccctgggggcagtgatgtctggggctgagcagtgcacgtgggcttgggagcagaagagggagcagcagggtgggaagatcaacgtcaggggggcagggacaagtcattttcattttctcactcccagggaccagaacccaggattctgactccagggcagagtaccacaccctgcttgtgtccctggatatcatgatgctcatagtgtcatgttgccttggcattcactttttaaggtgtaagtttattggcctcaaatcagaggcagggcttgtacaccatggccgttttcaatactgtgtctggttcaagtggctccagttggtgtccagagataaaatcttagaggcatctctcctgcttggtgtgctgggttcccctctctccagctgctttctttaaactgataattctgacatttgccctcacatttaaagtgaccatctctcagtcacagcttgagctcttggtcccagtgtttgctgcttgctttgaacacatccattaaagctccctgcctgaaacctgtcagataacaccctggacctaataaagccattggcttaccggtctcttctctcctccctgcctgggctcactgaacactgtgtctgtggcctccaggtgcgccgagtgctccctagtgtctgtaagtagtaaaaatacttatattttcacgttctggttgtatcattgtagcctcacatgccatccagggcctgatattgaggctgccctatgggacctgtgctggttgagcccctgctggagctcttgttttgggacctctggttctcttggggacaggagcttccagctaacttgattgaaaacctgatgtctttcattgaaacactgggtcagatgatgtattcatgggcttcagctgccataacaaacaccttagcctgggtgaattaaataatagaaatctgtttttcacagttctgtgaataatgtgctattctaaccactttaaaatgcacaatcaggtgaaattaaccacatacacagtgttaaattaccctcaccactatttttcctagaaaattgttatcattttaaactgaaactttgtatcttttaaacaataactccctgtatgttccaccctaggccttgatcacctctactctgtctctatgaatttgcctattcttgatgtttcatataaatggaattatacaattatgttattttgtttctgacatatttcacttagcataatgtttcccaagtctatgcatgttccagtgggtgtcagagcttccttcctctttatggcagattatcattctgttgtatgtgtcaccatatttgtttattcatgtgttgatgaacacttggattgttttcatattttatcttttgtgaataatgctgcaatgaacattcccatgcaagtacctgtttgagtccctggatttaattctttgggtacatacttaggaatggatgttgtttcaaatgagaattctatgattagctttttgaggaacagcaaagctttttctcttagcggctgtaccttttcatattctcaccagcaacgtatgaggattccaaattctacataatgctgctacttgttatttaacattttaaaagaatggtagccagttttgtaggtgtgatgtggtgtctcattgcagctttgactttgtattttcctaatgactaatgatgttgagtatcttttcatgtccttcttgactcttggtatatcttctttgaagaaatgtctatatgagtcttttgcccatttataaattggatgctttctccttttgttattgagttgtagctagttttttatattatctggacatgaaacctgtctatatgtggtttgcaaatattttctctcatctgtgtatattaattattttcttgataatttcctttgatgcacaaaaagctcacatcttgataaagcccaatttatcttgtttttcttgtttctcatgctttcgtatcatatctaggaatccactggatacttgaggtcatcaatatttacctctatgtctattttaagatgtttttatggttatatatctgatatttaactcactgatcaattttttacggaattgtttgataaggtgagaggtagggttatctaaattcactgttttgcatgtggttatctagtggtttctgcactatgatttgaaaggagaattgttcctccattaaactgtcttgacaccctcttcaaagtgtaattggccataagtgtgagggtttatttctagactctcaattctatcccatttgtctttatgtctattcttttgccagcaacttgtgttttaataattgtactcctttgtgagatttcaaataagaaagttcaagtcctacaatttattttggcaagattcttttggctattcaggggtacttttttgagaggtgggtaggccaatgtttcacaattgggaaagccttttctgtcttcttcagggggaaatttgggagaacctttaagaaactttacctaagcaggtaaactgtcaccactttatttgctgaagtgctatgttaaagtgtgcattgcctcttgtggaagaattatgagaccctggaagcacctgcccaggtggtgagagacagtgaattccatgatgaggggcagagaggacattgttttgggatacagtgttgttgggggagttgtacacatctcaacttctttatgtctctgtacagtgggtgtagggagcagctccatagggtcagtgggtttttctccctgtgtgcagagacgtgagattgtagaaataaagacgcaagacaaaaagataaaagacagctgagcctgggggaccactaccaccaagatgcagagataggtagtggccccgaatgccaggctgtgctgatatttattggaaagaagacaaaggggcaggataagcagtgtgagccatctccaatgataggtaaggtcacatgggtcatgtgtccactggacagggggcccttccctgcctggcagctgaagcagagaaagagagaagaaagagagagagagcttacaccattatttctgcttattagagacttttagtactttcactaatttgctactgctaactaaacagcagagccagttgtacaggatggactatgaaggcggactaggagtgtgaccacttaagcacagcaccatagggagacggttaggcctcttgataactgcgggtcgacctgactaatgtcaagctctccacaagaggtgaaggagtagagtcttctctcaactccctcggggaaagggagactcccattcctggtcggttaagtagcaggtgtttttccttgacactgagacaatcactacttcatggttcgcctggcaacctgcatcttcccagacgctggtgttaccgctacacgaaagatccctctagtggccctgtctgggcataacagaaggctcgcactcttgtcttctggtcacttctcactatgtctccccagctcctatctctgtatagcctggcttttcctaggttatgattatagagcgaggattattataaattggaacaaagagaaattgctgccaactaatgattaatgatattcgtatataatcatatctaagatctatatctggtataactattcttcttttatattctatgataatggagcagctcgtgccctcagtctcttgcctcagcaccttggtggcttggtgcccagaagtgggcatctccgttggacacagtaggttttaaaatccttgtttatcctctggtgtctgggtcttggcttagctgttcgctgcagctgaaagaggtgtctgctaaggcaatgacacctgtggggaggagaagggttcagcagagtgaaagtagctggggctcagagaagacaggaaagtctgactctttgaaactgtgggtcagctgatgggtgtcctcaggggtacatgggccatgccagtagccactgcagtggactggaagaaggtaagggatgccgggtatcccatgttctctctcagctctgcagctgaagatttcggccctgggctggtacggccctgcagcaggggaagggtacacaggaatggctgcatatcaggaccaagtccatgtcatcttctcaggcattgttactgcagatggaggattgtgttcagagacctggcctggacacatgggagggcccaccccattctattaaaattattttaagagaacagtattagcaaatgtggtacatgttttattctgctagaatcagtcttgctgtcatattttacaatgtatctcttaggaaatggtgagagtcatccacacaatgtggatttaaaggggactctactataatttcagctttcctactctttatagaaaccatcttctctgcaaacacacaggaaatatctctgttcatttctattgggagccctgtatgtgaggtgaggtggagagtgccacatttcccttgagatgttatgtaaaagtttgaggttgagatgacatatctgacactctgttgttaccctcagaagctactacatgtgaaattctaatgactgcattatcctgccaagtgaaagaggcaggcacaagcaaggacagctaagaggggtgagagcctcatcatgatggggagtcttattctgacatcttgggaaaaactgtccacgtgtgaagtcatcaacttgttttccttgtttacagtttgagcagctgttgttatggtgttgaacattttggtgagttctgagtggctcagacatcaggtacaaggattttcccatgaaatttacattgagttgtccaactctggcttatagggcttctggaacagagtgggtcttgctctttgaggttccatgggagaagatggaattggaggaactagtagaattcagggtaatgtccagtctacaggtggataataaaaacacagaaacaatgaacagagctgcaatctcataacaggtgtactacagtattattttccacataatttttctctctatgggcatctctagttttaccaatgataatttcagtagaatatgtttgtttgcaaaataggttgagtttcttcaaacttggtctgattgtttacataagcgcagcaagagtagcaatggaccatgtaggctctcttttaaagttttctttgctctaagtttttttaaggaatctgagattaaattttacaaacctcttgagaataggaagccaaaccaaggctgatttcagactttgcctgcagttcatactggttcattctatctatattcttaatataacatcccagtcaaagccttggtaatataaccaatgatttcaaatgtgtcctgttaaaaagagagaagattgttactgtacttgtgtaaatatctgtattaccataaacatgtcaacactcaggaatagttgcccaattctggggcagtcaggtagagagcaaaagtaaatatttgaattattgttcccagaagtatagtttattgaactgctgtgagctatagatagattaaagaaaaaaaattccataaatctagaaaacaaaccatttaaagaatcagcaaattttcaaataaaaatcataaaaacattatcctcattattatcaattctttcaatgaaatcaatgtttttcctgcttggtctaggctgagaattttatgaagatatcagcctgtttcttaaagttttggaagttcttagacagtccggtggtataatgtgaaaattatcagaaacttgtattagagagtacttgtcagcatcttttccataaatctccttgaaaaggaagcaattttggactgtagctgattggaaatgctttgaggaagaacaaaaacaacatctgtgaatgacaaagattttgaatgactatggttaaaactctgatgagaattcattatgataacacagctcacataaaaagttagttacttctgtggtacatgacattatggctgataacatatttaatttctaggaatctactttttccttcggggattacattaattttgtgggagggttgctggtagatgattagccaactatattcttgcagtttttttctatctcaatgtgtttctaggttagtgatcagtcttctgtcaatttcatcctgaccatgctgcactcagatatttttgaaggctttatgatgtgagaaaggctgactgctattttctgtgtcattagaactttgtacccttttatggttgcatctttttctcagtgtgtcagttgtggtaggcatgaataagactctgtcaggtctccatggcagcttgtgtttctcaagaggattactgagttcttggtggagcacattaatgaataggaccgagaaagtataggcttatgtatgttgaaaaatgtccctaggtaattccagcactcccagctaataattgattaattaataatcaattgacttgattgacagaaggcccaaatcagtgcattccagactgacaacctactttgcatagggtcctcactttcctgaagctcccagcagggatatgaaagcaagcccagttctatgagactctgttttattctcctgggtgactggtgggaagactccccatcagtcttcccatgctctctttgaactgtagctaaatcttctgtctctttctccttcgcaggaatcagatttgcatagtggtcccaaagctccccagatttttaagcctgccccaccttccctcacagacatttttcctaatacattatcctgcatgtctaatctcatcttggatgcatctcagtgggcataaactaacataccaggcttgatttttttgcacttagcttttttctgtctctcccacatgtagccagtaaccatgtcctagtgttttatgtgttacctcttttttcatgtttatagggaaaaaatatgtttccatatacttatttatatgtaatatatataataaaatgtgtaatataaaatgtataataatgtaaaacatatacacattttccatatatgtatatggaaaaagaggtaacacataaaacaccaggacatttacgtataataaaattgacataagttatatatgtatgtagtgtctggtagtcttaccctctttataaatacacactttctatcactgccccttccttccttcccatgtagagctcccatggccaaatctccctatttctccaagtttgtgtcactcactgtcctctgtgctgtgtcccatgtgctgtgtccgcagcctcctagtgttttatgtgttctctgtttctatatatatatggaaaaagcatatacatatttctctgtgtatatttatatacaatatataataatataaaaatatagaatatataacaatttaagatatatacatatttccatatctatgaaaaaaggtaacacataaacactaggccatttatatataaaattctcatatgtaatataaatgccaattttatcatatataaataagtatatacactatagatttatcatatataaggtgaatttggaatgccctgacctgggccctctgtcagtcaagtccttgccatggaggccattcatggctgccacaactgagacaccgagagaaagatgcaactatgaaaaggtgaaaagttctaaagtcatagaaaacagcaatcagcctttctcatatcccaaaattttcaaaaatatctgagtgcagcatgtccaagatggaattaaaaacttcaatcttgaaaaggaaaaaggaagctggaggattcacactttcagatttcagcatctactgcaaagctacagtaatcaatacagtgtggtactggcataaaggaggacatagaaatgaatgacatggaatagagaacccagaaaaaaagcttgcatatatggccaaatgatttttgtcaagagtgccaagaccattccatggggaaaggacagtctttttaacaagtgatactgggaaagctggctatccatggacaagtatgagttgaacctttacctcacaccatatacaaaaaatgaacccacaatggatcaaagacctaaatggaatagtgaagactaccagactcttagaagaaaacataaggaaaaagcttcatgatattgaatttcagaatgatttattagttataactacaaaagcataggcaacaaaaagggataaattggacttcatgaaaattaaaaacttttatgtatgaaaggccattatcaagaatgtaaaaaggcaaactatgacatagggaaaatatctgaaaatcatatatctgataagggattaatttccagaatacatgaagaacactacaaatcaaaaacagcaaaaatacaaaagcccaattaaaaaatggacaaaggactgaaagagagattttattaaagaagatatacaaatggccaatgaggacatgcaaggattctcaatattactaatatttagagatttgcaaagcaaaaccacggtgatacatgacctcacacacattaggatggctttgataaaaacaacatgaacaacatcacaaaacaagtgttttcaagtatgcagaaaaaatgaagctctttgtgtattgctgatgggaatgggaagtgttatagccactgtggaaaaaatggcatggcacggccggctcatgcctgtaatcccagcactttgggagctgagatgggtggatctcttgaggtcaggagtttgagaacagcccggcaagcatggtgaaaccccatctctactaaaaatacaaaaattagctgggtatggtggcatgcgcctgtaatcccagctactcaggacgctgaggcatgagaatcacttgaaccttggaggtggaggttgcagcgagccacgattgcaccattgcactccagtctgggtgacagaggaagacccggtctcaacatcaacaacagaaaagaaaatggtatgtcagtttcttaaataaattaaagcattaccacttgaaccagcaattctacttctggacatacagccaaaagtattgaaaaatatttaaacaggtatttgtacaccgatgttcacagcagcatcactcacaatagccaatgggtggaaacaaccaaaaagtctattgaaagataagtggatgaacaaaaagcaatatccatactttggaatgttcttcaatcttagcaaggtataaaattctgacacatggtgcaaaatggatgaaccatgaagacattatgcaaagtgaaataagccagacacaaaagcataattattatatacttccatttatgtaagatagttagaatagtcagttacttagagacagaaattagaatggtgattaccaggggttaaggggaggaggaatgagagttatcatttattgggttcagaggtttagtatagtaggataaaaaaagctctggaaatagatagtgttgatagtaacacaacactaaattgcacgcttagaaacagttaatagtaaatcttagatgtatagtgtctggtactcttaccttctctataaatacacactttttgtcgctgttcctcccctgccatagggagcttctgtgagttaatctccctatttctccaagtgtccatcactcactgtcctctgtgctgtgttccaggagctgtgtccacagactcagacaggcagtgacttcagagccaggacacagtcctattcccattttttaaagccttacccatgggaggcttggcttctactggccactcgatttagccagattcagaacaggccaccgaggcaccttatccacatgccctggccccagcccgggtggagtcagggcaggggcagtcactgggtgagcccacagcaatgcagggagcagtgtccgagctgcttctccctcacccaaggggcttcctcctctcatttggggaaaagtgtgggcttgttttgaagcctctgatgttcattgcagctcatggtgtacacacacacagacacacacacaaaggagacagaagggatgttttggtgacagaaacagcttgaccatgaggaccctcctctttctccctctgtgaaggcccttatactgcatagtgcttggggctgataaagccatttccctacatttctcaggctggacccaaggtcatccaccagaaatccggaaaacaaagggaagagaatctgtagatatgaattgggagtgttcaggagaaaaatttgggatttacttttgtgcatgggacacaggctgagaataaaaatgttttcctggctctttcttggaaagccagataggcttcacctgaaagcatattgccaatgctccagtgatccacttacaagggactctgattttcttggttgcgaagtttttgccattagtgactgggttatggacataacacagatagtccccactattttcagtagtgacttgggggataaagagctcttgtcctatttgttggttattcccattcagcagccaagaatactctgctgatggattagagcccgtgaggcaggagaggttgaggtttgaccctggatagtaacaggtgtctgaagaataagttgtgggttcatctgggccatctggagcaaagagaataaagccacaggtaatgttatcagagggaatgggaagctcctggtctgtgaaaggggcatagtgttcctttttgccaagtcacaaccccgaagtcccagccaaaacttcctctgtgttcactgaactggaggagtcaacgacattcacctgtttctcccatcgcaagctatggaaccagagtcccctaagaccggagaagcccctcccttcctgggcctacccaggtttgcctgggacaggaagtcatggccagcttgggggtccaggggtaagtgtcttcatacttggacctgagagggactgagaggcctggcctcatgttatgtggatttgggctggcagccttgtccatgaaggaaaagaggatactcacagagaacatccaggagactgggtcactgtggctggtgctcactatattcttcctttgacgttcatagagtcctttgtcactccttgtgacactgagtagagcaaggatcctgttatcattggacatctttagcctgggactgagtgtgagtctatgactatttacccaccacatgtagattgtgccatgagtctcaggttcacaggttaagaccacagcctcctcatcctctgcggagttgctggtgacatagggcttgggcagattggctgtgcagataacagagaagattcccctgtgtggcatcattgatttctccatgagcgttttccaataagagttgacatctcccacctctcagccaatccaagtccttaaaagcccacagcaggtctgtgtgtcaaaagacagatggatgcatgatgatctgagggctcagaggccatggggccacctgctctgtgtgcaagatgcacagacttctgaagtgtggatcgagcagcaatattggtgaagtgtgaattgagcagggtcaaacaattagagtttgattaactttgtttaaattgagaagagtccaagtgaggcagcagtggctcatgcatctccccaactgaaggaccccaccttataacactgttgttattatgaatacacaggtgtgaatgaaacaggcagtaaatcagacagcacccacctggccagctccacctggtcctaagaaccaccagtattcccattatgtgtatgttacagctttttaggctacaaaatataaaatacaatcacagaatataaaatatgctactgtcaatacaaaacattgaatatgaagctgaatatgttgttccactttttctcactcttgttaaactttgctgtttcagttttggaagtttctattgacacacacttaagctagagattctttcctcagctgtgtgcagcctacgagtaagcccatggagggcattctttatttctcttaaagtgtttttaatctctagcatttcttttgcttctttcttagaatagccatctctgtttaaatcacccatctattcctgaaaggtgtctccttttaaaatcataatccttaaccagagttgttttaaatttccagtctgataatttcaacatccttaccacatctgtgtctggttccaatccttgctctgtctttcaaactgcatttttttttttttgccatagtctgtcttgtatttttttgaaaaccacacatgatgtactgggtaaaagggacttgagtgggcaggcattcagtgacacggtggtgagtgtggggagggaagggttctgtggttctggatgaggtctgtgtcctgggctgtgaatgtcacaagtgcccctcaggtttttctttccattaggtgggatatgatgacttgaggaggctggagttggatacttcccctccctctggccagttaagctcctatcaaaccgcagctaattaggctgcagtgaaatagtttctcttaaatgtaggtcttaccaagaagaatataaatcactgacaactttccaagtgtttttttcccttcttccaagaagaaggatgtggattcttttttgatattgactgtgagaacctggtagagctccaggagctaaaagtcataaaactgtccccctactcccaagactaatccatcctctggtttgtttatctctgcgctgtgtccacactgagcctccagaatttcctgaattacagttcaggttttctgaaccccagcactggttcccgctggggtttctgtgcctgtgtttctgctcaggtacggtgcgctgctctgtatttgcctgtgggtctctccaatatgtgggccagttagcactgagaccttgcttcctgagaaatctaaacgagttgttgatttttcagtttgttcagctttttacttgttgttagaactgagtgaaaatttttaagctacttacatgcctgatggaaattcgaagtctctagggcatgacaggaggatatgagccccacagcaggttgaggatggagtcatgagtgaaatgggtgaaatgagcccacgggctttggaaactgcagatctgtccttctgcctctgaccccctggtgagtccatgtagaaagtgaaaccacctttgcaaagcatatgatggtgagaggaagctagcttggctgaccgcatctcacctctagcctcaaacttgctctctttgattcctgggcataggccagggtaagcatgggaggaatttatagtttaactttgaagcaaggatgataatagtccctccctaaaattagctcctccttgtcgggggctaccttggtaaatctaagaaaaaagattgaatggtctcatgattcagcaggttgtagagtaagcatcattctggcatctgctcagctttcgaagaggcctcagaaacttgcaatcacggagtaagccagtggtggaggaagacatcttatataatgggagctggaggaagagagcaagggttgcacactggtaaacaaacaggtaaaaactcacttttgctacaacagcaccaagaagaatggtcttaaagtatgagaaaccacctccattatccaatcacattcaaccaggctccacctccaactttggagattacaatttgacatgagatttgggtgggggtaaaggtccaaaaaattattattatttccatggtccctcccaaatctcacatctttctcacatttaataatatgaggatggcttcccaacagtctctagagtcttaactcattcagcattaactcaaaagcccaaaatagcaagtttcatctgagacaaagcaagttccttttacctatgagcctgtaaattcaaaaacaagttagttactttcaagacacaatggaggtataggcattgggtaaatactcccattccaaagggaagaattaggctgaaggaaataggatacaggccccatgaaagtctgaaagcttgcagcacagtctttaaaatttaaagctccaaaataatctcctttgaccccatatctcatattcagggcacactgatgtaaggcttaggcttccaaggttctgggaatcacagaaacattccaagagagtgaaaaaagaatttgtagtgtggcttttgatgctaaacagcgtattagactgagtaagtcactgaagagaaaaaagtcagaggagaagatgggtgagggtgacagaaatggaatggtgaaaggaaaggtctgataaaaatgtttaccggctggacatggtggctcacacctgtaatcccagcactttgggaggctgaggtgggcagatcatgaggtcaggagtttgagaccagcctgaccaatatggtgaaaccccatctctactaaaaatacaaaaattagccgggcgtggtggcatgcacctgtaatcccagctactcaggaggctgaaggcaggagaatcacttgaacttgggatgcggaggtagcagtgacctgagaacgcagcattgcactccagcctgggtgacagagtgagactccatctcaaaaaaaaaaaaaaaagtttacccaagggctcatctggtacctggctctgtgactaatgtcttacacattttgatttactcttccactttcattttctgatgcacaaagggtcacccttctgctgaagatgagaaaagaggatgagggagctcaaatgagtggtctagagtcatccagctacttcatagagcttgtgtgtttcaccttgatgtttgtgcacagacagaaaagtgagacacagaaggaaggcaaagcaagtttatgctgttggtgacacttatgaaagttacctgtgttggcagaataatggactcctaaaatgtttgcaccctagctccagaacctgtgcatttacttttcttggtaaaaacacagtgcaggggtgataaaattaaaatcttaagatgtggacgttgttctagattatctgggtgggcccattgtaatcagaagtgtccttgtaagtgacaaagaaaagcaggggcatccatgtgagaatgatgagcctgtgaaactccactggccaatgctgggtgtgagcatgcatcaaaagacaaaattacaactaatgtagttatagattttatttttcatttattatttgaggcagctctcactctacaaatatagtgacagccctccctgggctatacaataacaaaacagtgggttttgtcaagtgggaactggtaaacaaagccatataaataaataaattggtgaacttcaggtctcttttctgtaaaagttaaagcagaggaaacttttattctgctgtctcaggtagagtggaacctcctgttttcaacaaaaaacaaaagtctgttctggtatctctttgcttcattaaaatttcagttgtagactgtagcatttagcatgagtggttctattttggagtctctaggctctcacttaggtgagagtgtgaccaaaatttaaagcattggcattcatctcagtaaccatcatattgggcttccatcatttataggtttatgatgtcttcctgatcacacatttctttgagtttttgtcatttcagccaaagagagaccctttggtatttgttgatggctgcacacaaaactttttaaaaacttttgtagaattcaccacaccaaaatgtagaatttaaaaacctatagaatttatcacaccagagaggctactaatatgactattaggaggataacaccaaaagtttggagtatgcactttaggcaagatgcaaaccaactaaaatagaataggtcaaagaatgagccagaattgtctagcaattttaaccaagtagtatgtttggtaacttctgtgattgagtcattattatactcgatatatttgtttatgtgcaacagtcagtgtcagaaactgcacaggctcctccctctttagctggtagggaacaattttattatgtagcattcaatggctcattaaattaaaacagggagtgagaacaagtgagtctgaaaatgtaactttaaaagggaccactgtacatttgaagaaacaattgtgttaaaaatgctgctaatgtcagccattgggtggactaaatgatatcttatgtaaaaatttgagggtgacatgatatatctgtcactctgttacgctactctcagaagctacttcacgtgagattctaatgataccatcatcctgccaagtgaaagaggcaggcataagcatggacaaattaagaggggtaagagcctgattttgatgtgaagacttgttctggcaacttaggaaaagcttttcacagtgtgaagttgtcaacttcttatcctggttttaagtttgagtgtctgtagttatggtgtcaaacatattggtgagctccgagtgactcatacttcaggcacgagggttttcctgtgaaatttacattgagctttccacctccagcttataggacttcagtaacagagcagattttgttcttactgattcaataagaaaaaactggatgggaggaactagaagaattcagggtctagtccagtctaccggtgaataataaaaactcgaaaacaatgaacagagctgcaatttcatagcaggtatactacactttttattttcaacattatttttctctctataggcatatctatttttaccaaagacaatcccagtaggacaaatttgtttacaaagtaggtttagtcttatgaaactttgccgggattctttacataagtgcatcaagagtagcaatggaccacagaggctcttcctaaagtttggttcgctagaaatttttataagtagtctcagattaagcttttacaaacctcttgagatgaggaagccaaatgaaagccatcttcagactttgcctgcagtacttatgggtccattctatgtatattctcaaatataacatcttagtcaaagccttggtaatataaccaatgttttgaaatgtgtccttttgtaaagagagaagattcttactagtgcaaataactgtatcatcataatcatatgaatactcatgaatagtttcccaatcctgggacagttaggtaaagagcaaaaatcaatgggcttcaattattgtttccaaaagtatactttgccaaattgctttagatatagctagcttaaaagaagaaaaattacataaatctggaaaaaatcatttaatgaatcagcaaattttcaaataaaaattataaaaacattatccacattatttatttcaatgaaattatttttgttctgcttggtctaggttggcatatttcatgaaggcatcatcctgtttgttaaagttttggaagtctatagacggtccagtgatataatcttgaactgctcagaaacttgtatgcaagagtacttgtcagtatcttttccataaatcttttgaaatagaagcaattttggactgtaggtgattgcagatgctttcaggaagaatcaaaacaactatctgtgaatgaccaacatgtaaaatgactattgctaaaactctgataagagtttggtataagaaagggagtaactccagccagtactccagtcatgacgctgacaggggccccaactgagagaccaaaagaactttcttatcctgaagcagctgtcatggaaaaaaaaagaggagaaggaataaataataaagacagcaaggattttagccaattaatttttgagatagggtctcactctgttgcctaggctggagtgcagtggcacaatctcagctcactgcaacctgtgcctcccaggctcaagccgtcctcccacctcgctctcctgagtagctgggactacaggcacacaccaccatgcatgcttaatgtttgtattttttgtagagatgggcttttaccatgttgttgaggcttgttttgaactcctggactcaagttatccacccgccttggcttcccaaagtgcagggattacaggtgtgagccaccgctcttgctgctttcatgctttttataataagaatgaactccttatgtaataataaataaataaatgaaattatttgctttggatgtagcaaatgtagacttagattgtccagagtcaggagctaagcctcatttttttttgttttagctcagtgtagagtgcattgaaggtgtcctaaaaataattccatatagtaagccaattttaaaccctgctcacagctaaatctgccaagtatgagccaggtaaaattaccaaaaaaggtggttctgactgattccttaacaataacgtggcttacaaacaaagactgatatgaaatagttgatccaacccaaacactttgctcatttcccaaaattttctatacaaacatatacaacttaccacaacataaagatcataatgaaaagtttgccttttattcctttaaatgaccatatgtttagatctgatgtactgacagcaataattctcctttaagcggaaaactaataaaatttgaaaaatagtgattttatatttagatgatactcagatcttctgctacgtatgtggaaaatggaattattgctagaaacattgtttaaagattagggtatgaaaggagtattaggaagtcaggaggttctttctttaggaagcagcttatctggattcattcaaagagctttaggttagtttgaggtctttctgcaaaatgtaaattgctatatgagaaactatatatagtccaatgatgaaagaatgcaaagccttagaagcacaggcgacaattccagtatcttccctaaagttctgacaaaaaggaaaataactatcaaattcttcaactcgaatgcttattatgtatgtataagtcagttgtcagatgaagagaggctggaaatatgacttctacccctagggaactcacagtcttgtgggggccactaggggtggtggtgtgacctgcctggagcagggctaagtatggacttgtgagtcaagggctatcaaaacctaagtaaactgattgctgttcagagaaggtagagttccatttcacagtttgcaagaaggactatttcatggaggaggtcacgttggactagacctttaaaagttggtagaatttaaaagcaaggatatggaagcaggaagagtgaaagtgagcagaggtacagaagtgaggcaagggtgagcagttttaattttttaatggtggtattataaaacacacatcaaaatttgccatattattattattattttggagacagtgtctggctctgttgcccaggctggagtgcagtagctcaatcatggcttactgtagcctccacctcctgggctcaagcaatcctcgtacatcatccccctgagtagctgggaccacaagcatataccaccatgcccagctaatttttatatttttgggagtgacaaggtcttcctatgttgcccaggctggtcttgaactcctggactcaaatgatcctcctgccttagccccaaagtgctgggactacaggtatgagccactgcacctgaccccatcttaaaaatttttaagtgcacagttcagaaatacatttgcattgtgcaaccatcagcgccacccatcttcagagaatatttttcatcttgtaacagggaaaattcatatccatgaaacactaactcctcattcttcctcctccccaccccaggtaaccactattccagtgtctctatgattttgactgctctagggacttatataaatgagatcatacactgtgtatctttttgtgactggctgatttcacttagcataatgtcctcaaggttcatccatgttgtaacatatgtgagaatttttttccttttgaaggctgaataatatttcattgtatggatagaccacattttgtttatccattcatctatccatggacacttgggttgccttcactttttggctattgtaaataatgctgctataaacatggaggtaccaatatctgtttgggtctctgctttcaattattttgggtttatacccaggagtggaatggccaagtcatacagtacctctagttttagttttctgaggaaccaccataatgtttttcacagtggctgcaccattttaattcttatgaatagtgcacaggggttccaatttttccacagtctcattaaaacttattattttctggggtttttgctttgtgtttgagagtagccatttaaattggcataaggtataatttcactgtggtttatattttcatttccttaatgattagtgatattgatcaatattttctatgcttgctggccatttgtacatcttctttggagaaatgtttattcaggtcgtctgcctattttgttaaattgggttgattttttttttctgttgtttaggtagagaaggcaatccttgaataccagtgatgtttcactaatgctgggccattgatttcacaagaagttgtatgaggtattagaatgtgtgtttggtttcaatcatggctgaggttgaatgccttttccaaaattcagtgtgaagccacaaaggatccaggagcaagaacatggtgtgactgctctctgctaaagaatttcagcctgatgacagtgagcaggctacacatgagactgacacaagaacaggtggaaagggagaccttccactggaaaaaggtgattctaacatgcagaatcaccttcaaggagcaagtaagcagaaaaatagacaatggcacagtggccaggcaagaagacactaggtccagaatctgaggttcaaatcctggctctgtgagacaacaacatgccttggtttcctcatgctactgaaacaccaggggttggggctaggtcccattgcttgctgcacagaaagccaaccactgagacaatgaacattgccagggaagaaggctttatttggctgctgcagccaaggaggtgggagatcagtcttaaattcatctctccagccaactcaaattggatggtttatatagcttggaagggaagtaactacctgcagggaaaacagcaattaaggagggctaaggaagcaatcatgataaatgaggagtctggtgtctcattgtctgatggtgatgtggtgagtttcagtctcttgcctgaaggtccgtttcctaactcagatgactgacaaatgttaagtttcaagttttaagaccagatgggtcaatttctatgtttattcaaaaaccctgtaaatatcagttctatgtggaacttgagctggtttgcccccagttatcacagttagggttaaatgatgcaatataagtaaaacaccagcagtttctgacacacacacagagtgcatgacacaagtggtgtgttgggacaatatagctcagtgaactccctttgtctactcagttatattgagtgatgaggcatctctgaagatgccactttgctacttctcccctgataatttcaccagatccagccatatgagcactgcaagtggggacttagcttaaatcattcctcgtatttcctgtgcaggcaaatcatttggcaccaaaacaggcacagaagtccaagtcctgctgccagctccacgactgatgacacagacagactttgggattagtcctttaatctctgtcctctattaaatgaaggtcatcatgctgctgcctaatgtaaaaggattgtggggattttcatcattcattaccgattatcttattctttgaaaccccaagaaaactatacaaattccaaagtctaataggtacacaagggctttattatggatgatgaaatttcaaaggatgctaaaccaaaaaaaaattgtttttcttttttgagacagagtcttgctctgttgcccaggctggagtgcaatggtgcgctattggctcatggtaagatccaccattctcctgtctcagcctttggagtagctgggactacaggcacccaccaccacacccggctaatttttgttgtatttttagtagagacggggcttccccatgttagccaggatggtctcaatctcctgaccttgtgatcagcctgcctcggccactcaaagcactggcattacaggcatgaaccaccgcacccggccaaaaaaattttttttaatgcgctctcttttccatataatcccaaggttggtgaatcacctctaagtcaggagtttatcttagctgatactgccttagtgttggcacaacttaaatttagttaaactaatatttgcatgatctttgcacaacacataaacacccaggaacaggtggtgctcctcggtggtcaacaccaggatggctatggcagggcacattctttctctatagcccaggccactggcattcaaagaaatatttttcaatgtctgatttttctctggaagtaggaaaatgctttcctaactgctttacttataagggtgtttcttgctaattctgtgcccagagtaactaatggggacatagacatagacatcattcaaatggcattctctctttaccataacccatgctttaaaatgaaataaactgaacccatgccttaagacgacaatcaagaaatacattctgcctaaggaaaagtcctgcgttcaaaggtttttgtccaaataatctgacattgtggtcatgaaacattgaaaatagcatttggagcagtaagtataaaaatttagaaggagtaaaactacttgaatgcttgttgggaggtttacaatgtagtcaaacaccagttaagcaaaaataaaatttactacttaactatttacattttctaatgtgtggtttcatggaattgttgagataaaagtagatactgaaataggagtacttgaaagtaataagacagagatttttataaaatcatttctgacctgattaagaaaaatataatctctatcacatatgaaataaacacctttagaaaaatgcaatgtcaaagaaaacacttggaatggccaacaaatatctactacagatagaaatgaaaatatttatgttatgtaaatgtcgggtatcaaattgtctccgaagttgccttctagagaactttgtttagttggtatattcttcctatgaatcaaaggaatacagtgttacgatcataagtcatgagggacatgagacaattttaaggatttaggaaagtagggaagcagtgaggtgaagggtaggcagatacttcagagggtaaaaagtgtttttgattcaaaagaaaagctaaggtagtttgaagaaaacatgcatcatctactagttaatctggggtacaatgaaggtggtgttattttaacagtgttcagaaaagaccaattaattctgtggccatacagaaagaatggaaagattgcataaaacagattctgaggaatacaaatcaatatagcaaggaactttatgatgaaggacgaatgtgagcatagaatgcactgtttttttaattattattattagcagcatcattggtttggtgatgttacctacttttggagtggagctagatatgagagctgcatgtcccttgaactttatttggggtaaatagtgaaaacaatatctatgatgagttaatggctgcagcacaacaacatggcacatgtatacatatgcaacaaacctgcgtgttgtgctcatgtaccctagaacttaaagtataataaaaaaagaaagaaaaccatatctaaataaaaaagaaaacattccagaggtgcagaattcaagctagaagaattgtgtccttggatgtcccaaggtcaaattttaatatgtcattgaatgaaggttccaatgtttggaataatgaaaacagtcatattgaattttgtctttgctctcctccctccccagtgtctaccaaaaaggctgagtaaacattcatgcaagtcaatacactgtcacagccacaattcatcctagcagtctttcctggaatagtcacttaagacgtatctggtgaggacccactggcacttttagagcaatcagaaaatacctcaaattgctcacatctagtgtaggagaaggctaatccatccctgtttcatgaagcatcacttcaatatcctggaacagtcattctacccaaatcttctgtccctagagcccaagactctccgcatcttcatccattcttcacggggcttgatttccaagactctctaccatcttggccacacaccatgttacgcattcactatggacactgcaccactgcggatgctgcaccaagggttctgaatccaagggcagattgttatgaacagcccctttaaaagtcttaaacgtgatacactggtctgtcagcagatgtgcagagcctcttatgggagacacagtttttgactcatgtgattcaatgtccataaatctgcatccaaaagatgcccatagagacaaagagcagagtaaagtccttgcagcagtgtttctcaaacttagccacccaccagaactgcctggggaactttgaaagatacccatgctgaatcccacccaccaagattctgatgtaatgctatggggtgagatctggacatcaggatgtttggaatctccccaggctcatttaacgtgcaaccaagactgaagcccactgtcctcagcaatgtgcccagcccagccttcctgacatccccccatgggtacaggatgacagtttctcactctgaccctttcctttattcaatacagcacagcacaatccaacagggtgagcactgttatgacagagaacctggagtcggatctgattaaatgtcttcaacaaaaccagtgccaagccttggccattcagctatcaattactattttcaacccaggttctaaaggctcttcattagaaacttctcgggttgataatgattgggcaaatgtgccctttggatttgattgctaccatgattattaattaactgaattgtagagatatcgagtacctttctgcctcttgtttttaagaacccatgagagacaaggccaattgcagacaatgaggacgtcctcatgatagtgagatgaactgcctagctatcttccgatatcgttacttcccaccagttttgttgcttgcaaaacaacagaatcttctctccatgaaatcatggttatcagttaggaagtagcccacttggttctggatttcgtttagagatttaagatagtaacagagggtgcaggatgacaaacagaatttgtacactgtgtctggtagtggaaaatacccaacattgtactgtatgctgactctgtcatttcctgccttctctcctccttttctccctccctcactccctccctctctccctccctccttccttccctcatgaaagcatagcttgtttgccattctttcctccagtcaccagccatttacttatgcacatcaccatgctcatgccattaccaggggactttctatcagcatgaagacaagaaaatgcctggggcagaaagggtgtggggagcaggcagcacccctgcaactgcccggtagcatttatacattgctctcccaccttggtttctatccatagctttcctcgtcagagcatgttcactttaacatcctctagagcaatttcttggatccttcaagggctcaagaactaaacataagttcaaaagaaactgagtaggcacctaccttctggaaacaacatccatagaaaagacttgattgctatggtctgatttatgaacctgtggctcatatcaaggttagcatttgcactagcattaaggtattttcattgagataatttatgttttgaaagaaatactacaagatcaagaaactgtatcagttggagaatagaagtgtgtatgatttgtgtatataaatatgcacatcaaagcatttatttatttcagagagttgtataacaccatcagagtaaaaattgagtgattctcttctatttctgaccctacttccaatgtcttctctgtccctctgggcaaaaccatttaaaccttttatcttggtttcctttgtgagaaaatggggataatagatacccctgagccattctggagacatgtttggatgccagcccagttatatgattataggagaaaaaagctttgagcttttggcacttaggtgccacataaagattattagcaagctgctgaggttttatctttggaaactaataagcatttctcctctaaagcctcaaatctttagcccctggacacatgttcctgatagctctctctttacaaagatccccttggctccacaaggatacagatagtgctttgctgagagagtcactaccgcacattcagatgaaaggtattcattccgcttggcagagtcatggttagagtagctgctgatcccagcaaggcagggtgggtgatgggaagggattagattaggaagaaaagggatcctctcattctctcactgagaggactttaaacctgcagaagcacaacagtgagtggactacgtgtatgtgccaacgtgcaaagtcgatggtgcacacgttacaggttggctcgagacgatgccactcagacctgagtgcaccgtggaactctcttgaattctctctgcaaatgggttgccctggatgtatagagttattctacaggagtcctgctcctaactcatcagaaacgtaatgtcctctgttgatctcaaaggcattttcttctgttaaaagtattgtccattcagcaatatggagaaagatcatttgtgagaataaaatagaagtgtctgatggtagtggggggggtgtaatttcctccctatgtgagtagcattaagttcactcttaatttttttcttcatttctgtaattggagactgatttatcaagaggatatagaattcagtgactaattccattaaatgctgaaagaataaaataaaagtagaattcaaaaggcttactcctgattagttttcaagatgtgtctaggtacaggaagttaaaaataataccacagtgaatgctctgacccagtgctaacaaaagcttcctttttttggtgagacttggcatagaaaatcacacatgtcattcagtggtcctgaaaaatgatgactgagatttggactggttttccagggaataaaattgagtgactttttaaaaagttctactcctagaatctgggatctaatcaatccaatatcaacttcaagggaatagaccaacaaccagagatgaaattagaagaaaaataattagaatagcaagcataggctggttttccatgctatgattctgcagcaaatgtggtaatttgggaatactgatttgggggatctcttgtcatgggaataagttgtgttttgtcagctttgctgagtgtctccggtgagctaaaagtgattaaaacagagtgctggccctggtatgtaagctgtaatctatactccatatctaccactagccattttgaaggaggagagttccctgatccatctcacatgatgtgcaacaggcgtgtggctcgcccgcttggttgctcaaacccctgatgggagatggagcacacagatgggcaggtgcaggggctggagtgagtgctttgggctccagcctggcagtagtgtctggggagagggtgttcctgcagcccaagtctctttagtcttgctgtctgcaaatggcttaagtgttaaccggctcaatagaccctctgccttttcacaagggcagagggccagtgtgacagctttctgtattcccagcttttgcccagtgttctagaagaatcgggtcacacacacaggcttgaaggatgaatgtgggattttattgaatggtggaggtggctctcagcaggatggatggggagctggaagggggaatggagtgagaagatgatcttcccctggagtttggtcatccagcagccaaactcccctctgaccacccccagtttaactcctggcattcacacgttccttcccttctctctttctctgctgtgtcatctgttgtttgtctgcttgtctcctcatctcctcatctgcttctggagcctggggtttggggtttatatgggtacaggatagagggacatggcaggcaagaaggcaacttttcccacttagggccacgggtctccaggcttgagggtggggcctttgctggggaactaccttctttacccagtatttccctgtctcctgtccatatcaatttcatgaatgtgtggtcacaacatgaacccagaatttggaggttggaaagtaggagtgaatgcactcaatctaatagggtgccaattcgtagcatctaatttggtaatgatgaatgagtaatagaatcttttggtaggggcagacttggtgaatcttcaaatgtagcaggattttaaaatgaatcgaatactatctctcagtcaatacaattacctccaccactcctcagttcctaattcaagggttatattttcagtaactttatgtattcaaaactgtattagatgctggaaatacaaagatgagtcagacattattaatctctgtccctaaaacgatgaaaactagtgtggaagacagccaaaaaattagagattaatcttatctagaaaattctagaaacaggatgaagcacaacagaggagtattttaggcaacctcaaggcatttaacacaacctggagcctttagttaggttagaatatggccaggaaccggaagtcaagattcaacaaattgcaacactgcaataataactaacatcactttctaatagtgtttatagtgttttctaatatgaaatcaaaatctgtctttggataacttttactcactccctggtcttgtttctgttctctgggatgacacagaatatatggaattcactcttactctgcttagtactgagaaagcaaaaattaaataaggcattcaaaattcttgtctgtatatgggccaagggaaagcttccccttcaccctctgaaggtttgctgataaccaactgacaaaaggaagattcacaggagaaaaagcttaaatatttatttgatcacagttgtatatgacatgagagcctttagaatgaagacccaaagatacagaggaaaccgtccatttttatgcctaggttcaacaaagtatggacagccatgtagaaatagggttggattcttcttggcctctctgagcagtgcttcttccttctgggtgtgggaaaaattcaccatattccttaggtcccttcaaagtcccctctattcactctatttcaggaagggtgagaggaccaatgaataaccaactttctggaaagggggtcttaggatctacagtcaaacaaagtaggtcaggtcatttcttcttttgttttctcttttcaagaggcagggtctgattctgtcacccagggtgaagtgcagtggcctgatccatggttcaccacagcctcaaattcctggactcaagcaatctgccagtctcagcctctgaagtaggtatgactacaggtgtgtgccaacataccagactaatttttaaaaatttttgcagagatggagtcttgcagtattacccaggatggtcttaaactcctgggctcaagcaatcctcctgcctttgcctcccaaagtgttgaaattacagatttgagccaccacacccaacccagataatttctgtatggccagtttttacacagaaaggtagagggaaatttagagtccgatttttaggttttatggctttggggaaaaggggttctggtttctaggacccgtcatggggaagagggattctagtttctaaggtgcctccagggagaatgggactcagagacaggaaggcagaagaagctcagagagaaagttttgcttctgaggctctttcagaaggattccttgagctcaggagttccagaccagcctgggtaacatttcaagactccatctctgcaaaaaattttgaaaaaatagcctggtatgtggcatgaacctgcagtcctaactacttgagaggctgaggcgggaggattgcttgaggccaggagtttaaggtgtggtgaacttctgaggctttgattttggggtactgctttctgagccttagacctagaaccagtattcaggtcatgggggaagttcatataagaatctctattttttaactatcaaactgtgacttccacatgggccacttgggaatgctctcacccatagacctgtcatacacctttgttgggtagggacaggaaaagagattgagtagcataagataaagtcctcccgaccccacccatttcaataatgggatccgcatttatcatatgcagatctgagacccttcctgaacttcaggattcatacagtattagagagtggtctatacctttccccatgacctccagcccacacgaggttcagtgaccctaatgccacggaggccaggatgctgtgattaagatgagagcaggggtaagaagggtcttttctctgctcatggagcactggaaggaagtatctttttgggtgctggacagtggggaggtcaagactgtgggcagaggaacactggagccaatgttgggaataattctcatgcaagcaaagacgtggtgtttagctggtcacaaccccagaccttgagactccagttccacaggggtccaggatattgtttccatgtacaagatccatctgtgagaatccagtactttccaccacctgccgtggtatggctgtggtcccatgcaccatcaccttgcgcttcaacttctgcaatgaccccctaattgataacctggctcttgacttgaccttacagcaaacattctttttgaagaaaagtcacagagcttcaccccactggccgaaaccctccactattagctgccactgcacacagagtcgaagcctaaggcattgcacttacacattttcatgttatattgttgcatagatgttgttagtttctgagtagccaggagagcattttttctgcaattaaacatatcgaatgcaccacattctttaggtcccctcaaaggcccttctattcactctatttcaggaagggtgagggaaccggtgaataaacaaaggtccttgctttaaaggctgttatgaccataaagtctgtgtatttcacagctcatgacagcagcatcctgagatattatttattgtcaaacttctcttctcaggccacacatcccattgcaatggggaatgggacagagcaaattgcaagttcttggttctatgttccagttgcaatgttgctttcagttttcctgctgttaaaacagcttttgctggtaggactgtgggaagtgagaatagatttcattttacctgctgtgcatcagcagaaaaaacaagtctttcttttctcctagcagctgagatttctcagagttcttcctagaattggatgttatatatgatctactttactcatgccaaccggcatacacaccaaagcctgatgagtggtacaaacccacccaatgttttcccccaaaacagaagtaacataagcccatgtggaattgtcagaggtgtttgaaccagagcaactgcatcttgaataggagcagggtaaaatgaggctgagacctactgcgctgcattcccagacagttaaggccttctaagtcacaggatgagataggagatcggcacaagatacaggtcataaagaccttgctgataaaacagtttgcagtaaagaagctggctaaaacccaccaaaaccaagatggccacaagagtgacctctgggggtcctcattgctacactctcaccagcaccatgacagtttacaaatgccgtggcaacgtcagaaagttaccttatatggtctaaaaaggggaggcatgaataatccaccccttgtttagcatattgtcaggaaataaccataaaatgggcaagcagcagcccttggggctcctctgtctatggagtagccattcttttattcctttgctttcttaataaacttgctttcactttatggactcgacctgaattctttcttggtgagatccaagaaccctctcttggggtctggatctggacccctttcctgtaaaagaactattcattttatcttttggtcgtcaccaagcaaacacaattataaataaggaaaataatatatgattgtaattttactcataatcccgaatgtctctcatgaccagcacacctttggtgtattgggtctaaatcaaagaaaaattcgaggagttgaatgaacgacgttttgatatcttaatgcattttggagaaaaccaactgttgcaaaaagctaaagaaaacaaaaattcattgtttatagatcaggtcacgtgtttttcatttctgcaatggcgatgtggttgattcccatggaacacaatgagagtgtggtctcctttgagattgtatttattgataaatgcaaaaatgctaatgaatgctaacttgctggttctccatggccttccttcctccctccctttccaagaaggatgttgtatctgtcagaggcatttgaaccagagtggctccatcttgagtgagggctaggaaaacgaggcttgaacttgctggtcggcattcccagaaagttaggtgttcctagcctctagatgtttacagttaagggaatagattgataacattcactaaacagacccagaattgggagtgtcctgatatcccgatatcttgagaacagaagcattcctaattttgctttaaagataataacgttgattcttgaaaaatatagtaatttaaaaaattaatcctttatcacaaacccttgtagcagagcacatctccccatgatctttttaaattctctatataaacaagcactgtacctaggggttggtgtgttccttctcttactttctggaatgccctactctgtctatggagtcgctgtactttcaccactttactcttttaataaacttgctttcactttgcactgtggacttgccctgaattttcttgcccaagacctaagaaccctctcttggggtctggatcgggacccctttcctgtaacatatccacctggtcaatttaggaggcagctgttatgtttatcaggatgaagaaaataaaactcttttacttcaaaatgtatttctatgatatagtttgagatggctgttcagaaagccagcaaacaggaggggccctgcaaagctgtcttgtatggggcgatttgcatctgcagataaattctgcacggatgcagccaggctttctcagaggccatcctccctcgtcctactgtaggaaagatggacagagagtctgacatctttaaaggtctgaaagaaacattcgccatctattctctctgaggcctgctacccgggaggtttcatctatatgacaagaccacctcggctagcttggcctcttcttctctttctcccatagcctgtgttgccacaatgcgagcctccattcttcaacctcaagatggtgtgaaatcttctgcactccatccggggcatggggttgggtaatcaccctatgagttaccctacgatgctccctgtgttcaggagagtatatttgtttgacttttctccaattaattttgcctttcatgagtttattttccagcaaaacttcagagcaaaaaggaaggttttaccttggcctctgcaatgataatgagttcagatgtaacatgaaaaatttaggaaagattgggagaattttttttaaagatccaggaatttatcttaggggaaaaaaaaggaatagtactggaaggaggatgcaggaagaatgagagagagagagagaaagggagattggggcaagtgaggaggaaggagggtttgtggacgtctgacatgctggagagataatgaggagaccagttgggggaatatgagcttaagaggttctagtgtgtgcctattcgagacactggagaaacaatggaattattttttagagcttctctggatatagaagatggtttccatttgaatgggatgccaccatgttgagccaggaaataaggctttccttaaaggggctgcttaccacagacattgattctctcgcagtcctggaggctggaaatctgagacaaggtgtgagcggggctggttcctcctgaggcctctctcctgggcttggagatgctgtcttctccctgtgttctcccatggtggttcctctctgtgtaggtctatgtcctcatctcctcttcttataaggacaccagtcctgttggattagggcccactctagtgacctcgttttaccttaatccaatcttgtccattctgcagccctagggccacatgcagcccaggacagctttgaatgttgcccaacacaaatacgtacttttttaaaacatgagatttatacacggacctgttttttcgctcatcagctattgttagtgtattttatgtttggcccacaacaattcttcttcttccattgtggcccagggaagccaaaagattggactcctttgccttaatcacttctttaaaggccctacctacaaatacagtcacattctgaggtcttgggggctaggacttccatggatggattgggtgagggggcctcgactcagctcataacagcagagttctaatggtggttctcagtctttgttttgaggaaagtggtcgcttaaataacgacatatggaaaagatacaatttaagtaatagagacttcccaggcaaaccccatgtaaggggaggaatcgaacgtatcaagggcattccccaagcccaaggtgatagaggtgagaaatgctcacttattagtgcctatttcagtctcctgatagattttcatttagtatgctgtaaacaaaaatatccctgcagacactggcacttgagggattacagtggtgaggagaaattcccttatttatttgtggaattcagtgaagcatttcacagtccaccttctggggataatctgttcattgccatggagtaaatcaatagccttcatttagattcttaactggcaatttgatctcattcactttacccaacactcattggctggagggatgttggagactgggagcaggctcctaaaaagggtcttgaaaatgttatttcaacaaagattaattttgaggcattgagagtttcagaaaggttgacttttttttctgaagctcttctaagccaatcttaaatgaatcctcagaggactatttctgtgggtgtgtgtctgcttgtgtgtgtgtgtgtgtgtgtgtgtgtgcatgtgtgtgtcttgccccattccaattctccatccccatgctgaggaggctggaggattcagaatgcagaatcaggtgtatttttaaaaaatcattatgtctgtcctcaccaaaacactggctatttctatctttccttctcattttactctgctataggaatctaagtaaatcatctttaggaaataccaagacctaccaggggttttagattgatggcggccgacacaacctagtattgatagcccatgtaaatgtttgccatccagatgacaaggataacgacaaaactaacatgacctgccccatggtgtgctagacccacatctcttggggaatgttttgaagcaagttaatgcaagctacttgataaaaggcttctgtgatgaaatgagaatggggaagctgagttaaacaaaatcaaacagtgttctgtgttggaagcttctcaaatccttaaccatgctgaaaagcttagagtatttccaggagaatggcatggcaccccgcatcccagacctgcacagcccctgctcaggccatcttgtgggatgaacagtatgcaaaacacacattctggaacatgcttgaagagaggggaggccactctctagcttgggcacagttctggctctggcacacactgacaacgtgacaccgggtgacagtccctctgtaaactgcgcttcctcatatgcgagaggccatggaacgttggcctctcagacgttactggctctaacattattttgccaaaaataaaataattagggtggatgtgttacaggaaagtggtccagatccagaccccaagagagggttcttggatttcaccaagaaagaattcaggtcgagtccataaaatgaaagcaagtttatgaagaaagtaaaggaataaaagaatggctactccatagacagagcagccgtgagggctgctgcttacccatttttatggttatttcttgatgatatgctaaacgaggggtgtattattcatacctcccctttttagtccatatagggtaacttcctgatgttgccatggcatttgtaaactgtcatggcgctggtgggaaggtagtagtgaggatgactagaggtcactcttgttgtcatcttggctttggtggagtttcactggcttctgtgcaacctgttttatcagcaaggtctttatgacctgtatattgtgccgacctcctgtctcatcctgtgacttagaacgccttaagtgtctgggaatgcaacccagtgggtctcagcctcattttacccagcctttattcaagatggagttgttcttgttcaaatgtctctgacagatgtaataggtaacgctcagacactgacatcagaggcaatgcaaccttaacagaattggctgacatatatctctgggtataaataaagtctcagctttcccctgagacgtaatgatgagtgtccctaaagtttgcttcacccttccacgctaaactcgctccactgttccatcatctgctttaaagccacaaggacagccagttaggcctttgtcatcatcacttttaacttttgtttaacttttaacaaagattggcctttttaaaggctcagttatattaaaaaaaacaactgcctgccacttacgcagtccatggattttaaacaaagctggcaatgcaagtcaatgggaaaagaatagtctttttcaacacatggaattggaaaaactggatacctatatggataaaaatgaactttgatcccttactccatactctgcacaagcattaaattaagattaactgagatttgatctgaatgtaaaatctaaaattgtgaagcttttacaataaaacaaagctagacaaagactccttctacaaatacctggcactaaacattaaaaaatcataaattgtgctcatcaaaaatacatctgctcttcaagatagatgaaaaggcaattcactgactttgagaccaagtgtttctgttcagaatatgtaaaggaattctaaaactcaacataaaaagacaaaaataaaacaaaaacacatgcaaaaaataaaaaaagatagaaaataagcaaattatttggacaaaaggctcccaaaaaaggaaatgcaaatagctagcaatcacaggaaaagatgctcaatattattagttatcaaggaaataaaaagtaaaaccatgagatactcatacccattagaatggctacagttaaaacgactgacagtactaagttttgctgaggatgtggagcaattggaatgctcatgtattgaggtgagaatataaaatggtgcaaacacttttaataactaccctatggctcaacaattccacttatagatatataccaaagagatatgaaagcatatattcatccacacaaagacctgtacacagatattcattgtagcgttattcatgataacttcaatcggagcagaacccaaatgcttaccaaaggatgaatggataaacatactgttacatattcatataatgacataatactaacagataataaaaggaataactattgttacctgcaatggaaacacatataaatgtcagaaatagtacgttgttaaataggccagatacgaaagagaatatgttgcatgattccatttatataaagttctagaagagacaacgtgaaagtcatggtaataagaacagcagttgcctgaagttttgtggtttggcgatatgaggaaattttctggagtgatggaaatattctatatttttattcggatgatgttttcacaggtgaatatatttgtgtaaactcatcagaatatataaaaagattctacaactcaaaataaaattttaaaaaaccacaaaaagttattgtgatggttaatattgagtgtcaacttgattggattgaaaggatataagtattgctcctgggtgtgtctacaagggtattgtcaaaggagattaatatttgagtcagtggactgggagaggcagccccttcctcaatttgggtgtgcaccatctaatcagctgccagcgtggtaggataaaagcaggcagaggaacgtgagaggactagatgggcttagtcttctggcctacatctttctcccagctggatgcttcctgccctcgaaaatcagactccaagttcttcaactttgggactcggacctttgaacacagactgaagcctgcactgtcggcttccctagttttgaggctttgggacttggactgacttcctggatcctcagcttgcagatgacttattgtgggacctcaccttgtgatcatgtgagtcaatgctccttaacaaactcccctttatatatacatctatgctactacttctgtccatctagagaaccttgagtaatagagttatgcatttttattaaatgtaaattatgccttaattaaaaataaatatcttctcaacctccaaaaagagactttctgtctgaaacttgagaataagtctaaagttttcatttaataatgaatttgtaaaagacaggaaaattgattttggcattaatttgttcaacaaatatctgttgagcatgtcctatgtggcaggggctgagtgtggggtgtggattgggtgaatgtaaggaacatatagttcctggctccctagagctcatggtctaggggttggagagaattggtacattgggattttaaagggggtgccaaaagtggtgatgacaaagctcagggaagaacaactggagtggagggagggcatcaacatggatgctgaaccaagccaatgtactgctaagagtgaggtggaaagtatcatgtgaaccccagagcttcaattgtcaataagtattggggtgtgaccagcagattgatagaagacagcaaagagagaggggtgaatgccaatagagcagaatagcatgacttgtcaagagacaggacttttcaaggtgaaaggaagggagatggtcctgaagcagcagtcatgtctatgacccacctaagccctaagcaatgacagataggaacagagtcagggtcctcagaggacaacctagttttaattaaggacagaagttgagaagaatattttaagaaacatttgaggacatattacagtttgctggctatgggttagggtagggtggaagagagatatttggaataaagggtatggatgggacaagacaaagcagggcaccagccctaccttggacctttccttaacttgagacagccatgtccatgttgattcagccaatctgactcaggtattatgtaacttgaagttgaaccatcccaactgatataagtggtgatactgagtaacacaaatgtgctttctggattcacacatgtactttttttacatgaaaagttcaaacttctatgtggagaattttttcttttttttgtttctttttttgtttttttttttttgttgttgttttgtttttttttttgagatggaatctcgctctgtcgcccaggctggagtgcagtggtgcaatcttggctcactgcaagctctgcctcccggattcacgccattctcctgactcagcttcccgagtagctgggactataggcgcctgccaccacgcctggctaattttttgtatttttagtagagacagggtttcaccattttagccaggatggtctcgatctgctgacctcgtgatccgcccgcctcggcctcccaaagtgctgggattacacgtgtgagccactgcacccggccgatttttttcaacagtatcctcaagaagtattcatcattcaactctttctaggaaaggtatttaaaaaagaagaaaaatatcatttctggcctggaatgtcaagacatacatctcttagagatttagttctaataattattgtagagtcttgtggatgtttcttataattttaatttttacaaaaacaaatctgtccatccatgcatctacgtatgtatgtatatatgtatgtatctatctatcttcatcatcataattatgcatctaggatctatctattgtgtatctatctaataatctatctatgcagaactgcaacatttacatgactggcccataccgccctctgctccccactttttctaatcttcaaaatcaagtttctggactcagggctatgaaatgcaaagtgaaacagctcatgtccaatggtctgacactctgctgctcatgaaaacctgcaacatccaactgagtttttcatttttaacatcagcagatctagttctctatcttcatagagagttatttttaattttattaggggataaattcttttttaataaagaaattattaggtatcaaaataccacaatctctttttggatacaactagattatgtgtatgggtgaagtattttcaacttaagaataacattcctgttccttgaacactattttggaagtttgggttaagggatattaacttccttaagacaaaacagactcacagttgaaaactactcaccttctctatagaagttgcttaatatcaataatttttattgtattggaacaaaatagactataactttttataagatacatataggtttactactaaatattcttaaaatgaatataatgctataatattcttattttgaggtaatatatatatagtctgcaaaaattaggtttcctggtgtcattaaccacttatgcaattatttttctgaaatgaatacacatgctgtacgtgcagttttgcctgatacaagttttaaaacaacgtatattggaatcttggaactaaaaatgagaaaatcagtgtccccttgatgtcaatttcagttcaaactgcacttgctattttatttttaattggttacttacattatctgtacattgtcacagttgatggtatttgtttacttctctgtgaccataatttgcacagatttaaccataatacatccttaaagattacaagaaatcttttagacacagctcctctcagttgctgaggatccaacttttactcatttgttttcttcatgaatatgtatttcctgagttgtatgtttgtacatagctatttgtagcctttgaagtttatggaagtttgtttggttgcattcttggggcacattttctttccctgatgactgttaaggttaggatatttgacccttccaaagctcatgttgaaatttagtccccaatattggaggctgggcctaatacaaggtgtttgggtcatggggacagatcccccccattgaatagattaatgtcctctcctgatggtgaatgaattcttcctctattagttcctgcaagacctggttgttaaaagagcgggccacctccccggtttctctcttgcttcctcgctcatgtaatctctgcacatgctggcttccccttctcttctgccatgagtgggagcagactgtggccatcaccagacgaagatgcccaattttgaactttccagccaccagaatcataagccaaatcatccctttgcctttataaattatccagcctcgggtattctttatagcaacacaaaagggacaggactttttatatcttgccccactgtcttctagcatttcatgtgtcccataaagaaatcttagtctcctaggtttttttttttttctgaatatccacagaattctttccataacttcaaataccaggaatttattggggtatttgttaattattcaatataaacacagccttgtaattcttgggctatttctgtctgcagattcaaatttcactgtatttcaggaatttcaccttgaattgtatctttgaaaatttgttttcatgttccattcattttttaacccatgcaaggcatttagtgttaatgatatttgatctcttccctaccactccctcccatccccctctttttctctatctctgtcttccatcttttacttttcgttcttttccatctcacatgctcattttttcttctcaaaaccatccttcgaattccttcagtggtgtctcatctcccttttgctgcttctatcatgacctttgattttggtctctttttgtgtgtctctctctctctgagattctgaggctctgcctattccgtttttattctcatttgtttctaattgtttctaagactctgtatactcctttttcattctcatttattactaatttatttctgaggctttatccactcacttttcattcccatataacctaatgtattatcagttcttccttaaagccttatattgcttctttaaattctcatttcagagaaacaatattgtctttaattgattccttagaaataaccttgttcatggtttttggctgcgttgtggtatataatctttccgtttctcatcttcataaatcatgttctgttcttcttttttcatttcagcatcattataaggcccccggctggctccaccctttttaagtagcattgttcctcatctttttggactagaattttgggcaaagttctggggaaaggggaagaagaatgtgccaaacaagtgggaagattgggtttcagtctgttatctctaggatgtttctcagctggacttggcctgtgggttatctgttctagcatagcaggatatcttccaggctcacaaggaggctgtgcattttacagaacattttaatgtgattattttaccttgacttatcttcaccaggcagctttgggcaaagacggccaggtagcttttatcttattgactcttccttctatcctatgccatgattgaaacatgatgtaggcttccaaaaccaggccatgaaccttgatcttaactttctaagcatgggatagacacatttcctttcaatgtgtgccacccatccactttggataactatgagctgggtccactctgcctgagtcagacatagaaagataccttctcttggagttcccaaatacctccatccacttctcatacacttggctttcttcctgcatctactgtaatccagtgttataggggatctgtagcttcatccaagataacatttgtttgtttcttcttctcttgtttgctttggattggtttcataaaggaaatcagacaaaaatatatttatactaccatttgaaaagaaaagataaattccttctttcaaattcattcctttttgtttctttccagtgaatctcatggggtgaggggagcactgaagggaatgtccaatctactcaaatccaaaaagtcacaggtataaggcacagaaaattttaccagtctaatgatggcagttttaatgctatataaggacagagtatgcaaaaatgctattaatgaggatgaggagctgggagttcgcaaaatgttggcccagatgagtgcagcagacatttggcccaggtgagcctagcagatatttacatgaaatattagggagcatccatctgggctatgtgacttaggctggcgatacacgacagaggattccaatttgttgtataaatcaccctcagagcccccagcagtgaacacatagggggttcttttcattttcatgatgcttaatatagtctttaaaaataattaaaattaggtgaagtgtgtagatttctgagaaattacagaaagacattagttttgatacctcttgcttgtagcatttgaccaacataaacaaactaaaaggtttaaaaagaacagggattcttcccagtggtatagtgtaatgggtagggaaaaaaagttcaaaattgataaatagaccaatattattctcaaaactcataccactgtcattgggaagaaatgaatacatattacttagtcacttcatgttaccatatacttatattaacacaacaaaaaggaaattatacgaaaaaaagtcatacatttaaaggatggaagaaaatcctaggtttactcggagctcaagatcccattgagatgaatattgttctttcctcagattgttccttcatttcattcattcacttatgtatgcatttatttatttagagatggggtctatttctgtatttatttatttatttattgatggagtattgctctgatgcccaggctggagtatagtggcacaatcatagctcactgcagccttgaactcctgggctcaagtgatgctcctgcgtcagtctcctgagtagctgggactgtaggtgtttgccaccacgccccgctaatttttaagttttttttgtattgattgggtttccctatgtttcccatgctggcctttaacttttcagctcagcgatcttctgccctggcctcccaaagtgctgggattacaggtgtgtcccttcatttctaatgaaggaaggttttcctttgaatattcacaacagatatttttaaaagaaaggcagatttgaagcaaccatcaacaagctttacctgaaaattaatctgatatttacaattgcattatataaaagaaatgttacagactgaattgtgccacacctaccccaaaactcttatgttgaaatcctaacacccagtacctggaatgtgattgtatttggagatgggtcattaaggagtaaattaaagtaaaatgaggtcacatgggtgggccctaatccaataggactggtgtccttataagaagaggagatgaggacacagacacacacagatagatgaccctgtgaggatacagggagaagacaccatctacaagcccaggagagaggcctcaggaggcaccatccctgctgacaccttgatctcagacctctagcttctagaactgtaagaacaattgttgctgtttaagcattcccatatgtgggactttgttatggctgcctgagcagcctaatgggagtgcaaagactttctttaaataatgtataacaatgctggtttggaaatgactatccagtgttgagttcaaaactttatctttatggatgctgctatgagtgagtgtctaatttgggggcataatattgacattcttcgggagaaatgcagactccaatcagtgcagaaaatggcacagaataatgtttaaatatgccctccaggccataacatggttgggttaggaggaggaatattaaccattcccatcctaaaacacagaattttgggtttctttctgtgagttcaccacctctgaccttcacagttaagggaccatcacacagacatctgccattttcatataactgtctatccaaacaaaggctgaaaattcagcatggaggaactctcccagcacccgtggtcagccccttggcctgcatccccaccctgggcactggtgtgggggtgggattctttatgaacttgggccccaattctgcttcccctggaaagctggacccacacaacatcaccctcatatgcagaccctcatgtctgggcacctgtgcctacccggagctgggggtctgctctaggagctggttcaggacaggatactcccatccaatctgtgcccaccatagaaaagagccagccaagtgcctgctactacagggctcttcacacatggaaaagctgccctggggaagtgtcccaggaaagggcagggggacaaaaaaaggtcacagtgatttgcctccagacactggacactcttccctggagagtacagggcatgctcctctccaaacctgatcttgctacatttgtgctgcccacagtagtggtgccactgagttttcaaagaagacagcaggccctgaattgtgcaaggaaaataagtgcttgaattttgtagcatgcatgcagtgttctacttttaagaatggtaccaggctcctctgatattcaagaaaggcccccaacagctcagatggtagttttctaatcctgtcttcccacatgcacatttacctcctccacccaagaactgaataacagacatgagtgctcaggacgtcatgctgtctactgtcatccccttcctaagaccccctctccccatctcttgacacccctgttcttagctccctctttctttctggcctgttacactcaacctctccagcatcctaacaagtacccactcaaacctatttcctcccctgctgtgctgcttcttcaaaagtgctttgcttctcatcctcaccttctttccttgccctcttccctgcttccctcttcaaagcacttctcagctacaaatgagaaggaagggatctgattaaacaggctatgagcagagtcatgttctgaggagatttgcatttttaagaggagattaatgaccacatctgacaatgtgaccctggaatcttatgcagagtgataggggatttgggatgagctccgttcagggtaggaagcgagagtttggatctgaaatacttttcagatgctgaagtcataggagcttgcagttgcttcctgggcagagccataaacaaacatctcttctgcagagtgggggctgagaagatggaacagtgacccaggagctatggaattatctggccatgttacacttgcaggactacacacatttaagtgaaaaaacatgcttttcgtccgcctggctgacctcttagcctgctctcctcttattgttcccttgaaggcatcattttttgaaagagaaatttaaaccctgtccatctcatcttctttggaagaaagttaagattcctttctgaggtctttcatcatctggagtttaaaagcttcctctcctctatcaactctctttgaatccctcatgtcacaccaaacttcaaaagagacaaatacttttgcatgattccctgcaggctctgttttgccctgtagtgacagccccatgtcttcgctttcctgactggaaaaacttctcaagctttctacattcatgatctccacttcttcagtgcaaccttctccagtttgtctctgatctccaatggtccctgcattaatcttgtccgagccacaggtgaccctcgtatcatctcagcttctacttcccagtctctctctgttttttttttttttttttttgagacaggggtctcactctgttacctaggtttgtctcaaactgttgggctcaaaagatcctccgacctcatcttcctgagtagctggggtaggggtgtgagcccttctgcttggtctccagtctttgcttttcttttttgacctatacgtttggtggttgatgtccatgttcatgtaattgtcttctctggcttctcagggccaccatgcattcccttctccctcttttcatttattatcttttcatctagtaaaacccatcttcccctaaagatgtatattttcctcaaagcaaggattggcgtaccttcacaaactgagtctccaatgacaacacaaactgaaatgcaatataaatcatggacagatgtgagctcctcttctacttcctgtgtcctctgctggttcttctcaccaacatcacgtattgctaagtaagccagtgatgtcaagttagaaaatggactgagtccattaattcatttggcacgctccaaagtcctcacctgagatctatctactctccaaataattacacttcttagaaatacaggaagatccttttcacatgagctaattagggcgaatacatgtaagtgttggtaagaagtactagaaatactggaatttgtgagatttcattgaagaaccaacttccacccagcccttcacattgttctctttcggtagtttcttgtcatttcctccttttactatcaatagggctgctgtgaacatgcatgtacaagtttctgggtggacatatgttttcattttttgggggggagtagatatcaaagagtagaattgctgggttgtatgatgaatgtgtgttctaacttttcagaaactgggcttctactgcttcctaatttcaccttccacgccatttctgtagtgaggcccactccttggccttacaagacctgaattaagttaggtgccagagtcgttctgtcattgactctgttctttcccttgctagcctgtgtaataattggcagtcagacctttacataagcaagggtttcatatgtctccccagttatattacaagttccacaggggcagggctatgtctatctccttgacctctgaatctgcgatgcctggcagagggctgtggacaccggtcaccctccataaacactgggagacaaacaagggagtcagtagagttatttttttgcttttctacccccagaactgttagaatatgatttgagctattccttcaaggaagtcctggggcaggtgatcattcatagatgatgtgagggagtgcacagcacatgagtttgcaggaaaatgcaaaccccacgttgaaatttgatccccagtgttggagatggggatttacaagggggtgtttgggtcatgggggtggctccctcatgaatggcttggtgctgccctcatggtaatgagtgggttctctactcaatcctgcaagagctgattgttagaaagagcctggcaccttcctctcctctttctctttctcctgcttcttctctcaccatgtcatctgtgcacacaacagctccccttctcattccaccatgagtgcaagctccctgaggcctcaccagaagcagatgctggtgcaatgcttcttgtacagcctgcagagctgtgagccaaataaacctcctttctttataaattatccagcctcactcaggtattcctttatagcaatgcaaaactgactaagacagggtatcaggagacctagatttgcctgcatctgagaacgtcatcaggactcttggaacaatttagcccacagttccaaggttgatttttgtcacagcgaagttcaggtagtaagaattctcactggtggctgttgagggtggtggtggtggggatgggtcatatggagaattagcagtgggagactagaaattaaagtggagaaagggaagaattaaaagtcaaaaacagtgtgagggaggaaagcaatggatataacacctcggatctttatccttgagaggccttaaaaatctacttaataatcagatggtattctataagaactttgagactagacatgtgatgacttttaggaaactgccctggagctgaaaatgcatgcaaatctagctgactcagctccagccttaactggctcataacttgtttcataaacatgactgtatgttagcaaggaaatgagagagaataacagcacatcacataggcatgaaaagtatttgcaaagcagcagttctcaaaaatgacattttgcagagttttccagaagcagattcagaaaactgaagaccaaagtaatgagggagctgtctcatgcctagatgagcagaagcataccaaaggcttagtatttccccaagtaataggcacctgaaacttatttaaggaaaatactcttcttgatgaaacaggcactgcagttgaagcaggaatgtgtttggtgtgctgccttaaatagcatgggtagatgttcaaacatgttaggactcactggccctaggaaagacccgcaagtatctggtctacaccaggaaattgacaatgaaacaccaaacaccttttctcctctaattaccaagaaaagtatttctttcccaatggtggaagacaataatgttgggaatgatgaagttttctggagtgtgaagtggatatgtcttataagtttaatccacagcttcaccacttcataagtggataatcgaattgtgcctcagtttcctcagacttggggatattaagagtaccctcagtcaccacaaggtgggtaccaacataagaaaagggtatagcaaaagcccaggggtgcatgttcttaaagtgcctagtgtgggattagaatgacaagtggtagatgacttacttgtgcagaaatttagagttattttgtgattttcaaatgatcatgggtgctttccatatgctgtccagactgggggtgctgcagctagaaagggaagaaggtttccgtatttcctgagactggagtcacatcctctcaccaatgcactcacctgctgactaaccagtgtacttctgggaattgcaaatgcatgaaatggcacccattctagactagtcacagcagtgtttttgatggccacagaccaggaacgaccctgatgtttatccgtagggaactaggtaatgagccatgatcctcatcatggatactgtgcagctgtggcaaagaatgaggtatccttctgtctgtgcaccgggaaaggtttccaagatacactgcacagtgagaaaaacaagaagcagaacaatgcacggtgtgctacctcttgcattacaaaggaggaaatgtaaaactaatttacaaatggccaataagcacatgaaacgatgctcaacatcactaatcattaggaaaataaaaatcacaactacagtgggataccaccttacatccattatgatggttgttctcaaaaaaaaaaaaaaaaagaaaaacagaaaagaaaaatgttgacaaggaggagttggaacgcttgtgtagtgtttgtgggtatgtaatatggcgcacccactgtcatcgtttctcaaaaaattaatcatagacttaccacaaaatgcagcaattcagcttttggtgtattccaaaaagaatggaaagcagggaccccagcagatatttgcctgtgtttgttcatagcagcattatttataatagctaaaagttggaaacaagcccagtgtccatccatcgtgaatgaataaacaaaatgtggtctatacgtgcaaatgaatgggattcagctgtaacaagaagggtggttctgacgcgtgcttcaacatgatcaagccttgagttctttctgctaagtgaaataatcagactcagaaagacaaatattacatgattccacttgacagaggtgcctaacgtcatgaaatgcatagacggaaaatgaacaggtggttgtcagtggctggagggagggggaaagaggagttggcgtttaatgggtatagaattccagttcgggaatatgaaaaagttctgggtggggatggacagtggtggtggttgaacaacaacctaaatgtacttcctgccattggatgtacacttaaaagtggttaaaatgggccgggcgaggtggcttacatctaatcccagcactttgggaggtcgaggtgggcagatcacaaggtcaggagatcgagaccatcctggataacaagatgaaatccactctctactaaaaatacaaaaaattagctgggtgtggtcgcatgcacctgtagtcccagctactcaggaggctgaagcaagagaagcggttgaacccgggaggtgaaggttgcagtgagctgagatcacggcattgcattccagcctgggtgacagaatgagaccccttctcaaaaaaaaataataataaaaaaaagaaaaaagaaaagaaaaattggttaaaatggtgaattatatgttatatatattttatcagaatttacaataattcctattgttttgcataaaacagctgtagaaagctttgcaggtcatgaacagcacagctggccactggggctggtgtggggctaggacctggttgcacagggaacagggatgagacacaggctcttcatgcctgcacatatatacggatacacacagatgcaaatttctaagccatctaaatacaacacctattcaaaaaatcaaacagaaaaaggaaatgttatggaggtgaaggatgagggtaggtggggtggctgctcaggacagtggaggccacatcacgcaaccttcgaggcctctcttagctgctggagcacatcccagggacttgggagctctggaaagaggagcaggagagggccatggccggaggaggcctgaaaaagatcatctctgccacagagaagaagctggctcagatgcttgtggccactgtggagacagggagacccagggagacaacagtattcactcaaggaggaatgggtggtgatgcaaacttgggtggaggccacagggtgcagaagacaggacacagcagagagtgatgtaggacatggaagggacagaaaggagtgaccaccggacataaaggggcaaggaaagtggaagcatgagaacatctgctgggcatctggtggagggatcaggttcccagggtgcccatccctaagggagaacccaggataggagcagattcagagaaaaccacccagctcactccagcaagaagcagaaaagggactggttaaaggacagggtaggaaggtcaccaagctccaagggccctcatgaatccagcttgtaggccacagggcccagggcaaggaccaaaccacaggcacaggacagctccggccaagatcttctggctactgcaggaggcagaaaccacaccctacaccctgcactgctgaggctagccctggagtccagaagcttctgcaccagaacctttggtcccccatccccctcaaaaaattaaaaacaaaaagcaaatcggtgccatgcacactctgtttcctggtgctgttctggatcctgagtctttcatgggagcacctgatggggaaagcctggacctgtgttggtgtccctcctgcaaggagtgctgggacaatgaaatttctggcttcctccttgggaaggcagaacattccccatgtgtactggtggcatttaaaaactgcagggcagccagagaacatgcaccgtgttccaccaggagagtttctggcgggttgtcccggtgcagacacccgtcccaaggtgggtatttgagctgaggaactgagaagccggtttctgcctagagttagagatccgaaaggcatcaccacatggaagggaggaaagctacgatgccttgagggtgggagatcagatgaaccaggagaggcagggcccgggaggaaccccggggagcagccgcctttaaagcctgggggaagtagcttcagagaaggtggggtaggtttgtgtggggggtgctggaaaaatataattaagaaagaaatttctgctcagtccagaaacccctgtcacatccgtagaagtaaaagaaacctgtgttatgattgagtaaccattaagccaaaatgtgatgcaatctgctaagagatgacaaagacagaaagaaatcccacctttgtatccagccaagcaggtgcaacccgttacacatatggtctccagatagatggtgactagttcccagttgagaggactcaatggccccatttgtcacacatagttcatcctaaattcacccagtaactgtgttggttctctgtgaggttaattggctttatccacaggaaaaacaaacctctcttatctatgacaggaggtagttttgcaactgggaatgagatgcccccagaactgaggttccttccttctcacagaaactgggagacaggggcgctttctggccagatgcctgcctttcaaagagatggctcctatggccttgaggaggatagttctgggttgtgaggcaggcaagatgcttatgtatgtttagaaagctttacatacatcttcaagggacagagaaagaattttcaattacacctcttctaaaaaaaaaaatgctctcaaagtccagcctaggcaacatagcaagatcttatctccacacacacaataataataataaatttgctgggcatagtggggtgtgcatgtagtcccagctactcaggaggctaaggagggaggatcacctgagcccaggaagttaaggctgcagtaagcttggatggcaccactgcactccagcctgggtgacagggatggcaccactgccctccagcctgggtgacagagggaggctctgtcaataaatgaatgaatgaatagaaaatgctctgagtgaaaagaggagagtctctttatctttttgcaacaggctaaacaaaatttttagaatgtatatttgcctcacagagattattccaggaaaagaagtggccctcagtgtcaaaggatgcaaaactaacctgtgagttcctggcaggtttagcaataaagcaggatgtttctgatctcagtacaagcaatgttagagaaaggggaggatggaagtggacgtggaccagtgagtggaaggtgacaaatggaagcaaaggaacgtatccagaccattgaagatgcttgaccgagaggaaaggggcggtggagggaacggaagcccgaggaagtcatttgttgcaataagaggcctcagagcacgtgtagggtgcggggcagagcccatgcagaggggctgtggaaggctggcagggtgcaggtggccccactctctgtcaccctgaggagtatgtggtcagagttaaagctcagtctgtttctgggatcaggtaagaggtcagcgtccggagaagggaggtggatcttcagatcctgcagacctccaccgcgccctctgtccctcttgactgctttttctccatctctattgtctggctcacattcctgtcacgtcttcctttctccctacccctcttttctcttttctcctctctttttcttaacccttgtacctttggaagtcccactaatagaatttaaacagcttttcaagttggttttttgttcccagaaattgacattagactctccatgaataatgtagaaatcaagagtataagctggttcatgtctctgcaaataaacaaataaaatctacattccaatgctttcttcttccagagtagcccacatttgatatttgtttttaattactgtcacttgcgatagatttttaaatcttgtaacctggttacacaaataccatggggcaaaagccttacttcctgtgagaggaaaccaggcttgactagcctcatgctggctttgaagaagtaaaatcaggggttgatgaatttgcatagggtaaatatcaaaggtcgaaagtcaacaataggtgatagagggaataccccaaattacaaaagaacaaactgtttaagccacaacagaattatcgtagaaataaaccacggtccttcctgctaaaatattccacttagaattgtaaaatattcttctcaataactcctggaagagcctattaagaaattagtgaggctgggtgcggtggctcacacctctaattccagcactttgggaggcctagacgggcagatcacctgaggttaggagtttcagagcagcctggccaatatggtgaaacactgtctctactaaaaatacaaaaattacccaggcatggtggcaggcgcctgtaatcccagctattcggtaggctgagggaggagaatcgcttgaacccaggaggtggagattgcagtgagccaagatggcgccactgcactccattctggacgacagagtgaaactccgtctcaaccaaaaaaaaaaaaaaaaaaaaaataagaaatcaacgaatgtaagagcatctatgttccaaatgcagtgtattattttatgcaggttttcacaagctccaaaagattcactgtgcagaactggaggttctagagaaagaccacgcctcctcctgcaggtaactcttcattcaggaagcagctcttggcttatccctgggcttagtggaattcgaatacctgaccataggacaccaagggctttgggacctgagtggcacatcatgtcctggtgacatctgagttacctggggcgtgcacagcagcctccagcatcccagggagagctgtgtacggggtcaggctcaagcgggtcccagggcaccagtgacccaatgggtgactcagactcccatggcacctgctccttctgtttctccctccgccgtatatatgagctcatgggaagtgctgtgacctcttacagaggaggaaagtgcatggacttccagcttctagaactgggatacaataaactcctcttgcttgtctattcctctgcagtattttgtcatggcagccctagcaaactactacagggactgtgggggttaggatgacaccaagcatcaaatgccactccctgttccaacactgagaccattccacagcccctgaatgacaagacaggccttcaagctcaagactacttggctaggtaagtactttagtcacaccacttctgaactttcttgcctacctgcagggcaggaatttttaccattttcaaatgaggacactgaagctcagagaagtgatgctatttcctgatggataagaggtgatatatttcagtcctcagaccaactctgaagtagcaagcttctagtcttaagagtcaaacttggctgggcatggtggctgaagcccataatcccagcactttgggaggccgaggtgggtggatcacctgaggtcaggagttagagaccagcctggccaacatagtgaaaccccgtctctactaaaaatacaaaaattagccgggcgtggtggtgtgtgcctgtaatcccagctactcaggaggctgaggcaggagaatggcttgaacccgggaggtagaagttgcagtgagccaagattgtgccatttcactccagcctggggaacaagagtgagacatcatctcaaaaacaaaacaaaacaaaaaagagtcaacctcgagccaggcacggtggctcatgcctgtaatctcagcactttgggaagccgatgaagtcaggagttcgagaccagcctgggcaacatgctaataccctgtctctaccaaaaatttaaaaattagctgtgtatggtggctcatgcctgtaatcccagctatttgggaggcggaggcacaaggatggtgtgaactcaagaggtggagcttgcagttagccaagattgcaccattgcactccagtctggagtgccaaaaaaaaaaatccatctcaaaaaaaaaaacacaaaaagaataaatatggggcctcatgactgtatattactgggcttctgacctagactgaaagatcagggaagagtttcctgaagagaaagtgagctatgatgggcccactgtactccagcctgggcaacataatgaggctctgcctcaagaaaaacatgcagaataaaaccacaaaaagataccactacagaactattagaatggctaagattaaaaagaatgaccacgccaagttttggcaaggatgtggaggcactggaatgctcacgctgctggtgggaatgtaagatggtacaatatctatggaaagcagtctggcagcttctaaaaatttcagcatacacccaccatgccactcggcaattccattccattcccacattatttttatttaaaggaaaatcaagtggaatgatctttaaagcatttttgcctgacaaatacatgaaatgtgggtagcagcccaacactccctggtcagtcttcacagggcatatgtggcctcgtggcccccaggaaatatggctctttccacaagtgctaagtccagtctctccatcaatcctaagatgttagttccacagcactgccagcatggggctttgtctatttctttctttctttgtcttttttgagaggggtcttgctctgtcatccaggctgaagtgcagtgatgcaatgttcgttgtaatagctcccatttcatttctaattgatcttatttggctcttctctcttcttttcttggttaatcttgccaatggtttatcaactttatttattattcccaaaaatcagctttacattttatttatattttgtattattttgtttcaatttcatttagttctactctgatgttggttattttctttcttctgctgggtttgggtttggtgcattcttgtttcttgagtttctagaaatgtaaccttagattgtctatttgtgctctttcagtctttttgatgtaggcatttaatgctataaacttttagcacactctttgctgtattccagatgttttgatagggtgcgtcactattgttcagttcgaagaatttttaaacttccatcttgatttcatatttgacccaatgatcattcaggagcaagttatttaatttccatgtgtttgcatggttttgaaagttccttttggagttgatttccagttttattctaccgttgtctgagagagtacttcatataatttcaattttcttaaatttattgagacttgttttgtggcctatcatatggcctatcttgaagaaagttccatgtgctgatgaatagaatgtatattttgtggttgttgggtagaatagtctgtaaatatctcaagtctattttctctaggacatagtttaaacccattgtttcttccttgactttctgtcttgatgaccagtctagtgctgtcagtggagtactgaagtccctcacaattattgtgttactgtctatctcatttcttaggtctagtagtaatagctatataaatttgggagctccagtgttaggtgcatatatatttaggattgtgatattttcctgttggataaatccttttattataatattttattattatataatgtccctctttgtcttttttaactgctgttgctttaaagttagtttttttgatataagaatagttactcctgctcacttttgtggccatttgcatggggtgtctttttcttaccctttaaccctttaaagtgtttatgtgacactttagggttaggggagtctcttgagggcagcagatacttgcttggtgaattattatcaattctgcaattctatatcttttaagtggagcatttagaccacttacattcaatgttagtattgagatgtgaggtactgttccattcatcctgctatttgttgcctaaataccttggttttattcatttatttattgtatttttgttttataggtcctgtgagattcatgctcaaagaggttctgttttgatgtgtttccaggatttgtttcaagatttgggttccttttagcagttattgtagtgctggcttggtagtggcaaattctctgagcatttgtttgtctgaaaaagactgttatctttcctttatttatgaactttagttttgctggatacaaaattcttggctgataatttttttttttttctgagatggagtcttgctttgtcacccaggctggagtgcagtggtgcgatctcggctcactgcaacctccacctcctggattcacaccattctcctacctcagcctcaccagtagctgggactacatgcgcctgctaccaggcccggctaatttttttttgtatttttagtagagacggggtttcaccttgttagccagcatggtctcgatctcctgaccttgtgatccacccgccttggcctcctaaagtgctgggactacaggcgtgagccactgcacccggcctgataatttttttttaaggaggctgcagatgggtatgcatgctcattggaggtgagcattcttcccttattgaagattactaaaatcacatgtattgaaaagcatttgggattatttacttaattgatgagtactcatttatttttacatttatttgataccacgtataaaaaagtatggacatatacatatgtgatatgcgatacaccatagaacatatacatgtgcacataaagatagagggagacagaaatacttcagattttttcttttaaaactttttgcatgaacccataaaactcactgttaaaaaaaacagctggatttaaattgtgcttttgcaaaaagcaaaagttaacatttaattgaggaagcccttgctgagttttagagaaagtaggtagtaaatttacatctcaaagcacacacacacacacacacacacacacacacacagagagagatagagagagagagagaaggaatttgggtgtgttcaaggaagattaaaagtagttgccaaggtaacacaaaaatgatagaaatttataacaggattttataaggagaccaattttatttacatatatagcttttattttggtctctgttttccaactgtactccaggaaacacactacacaggctcccttcttaagtgctggtgggccactgcacatgcagacagcccactttaagggaagaatcaggggagaagagatgcagaccccagaattatgccaacatacaaaagcctaagtcaaaggtcaaaccacacacttgaaatctcatcgcctgtttggccctgttttaagtgtactttactttctttaatttctgctctaaagcttttaaataaactttcactcttgctctaaaatttgcctgtctcttcttctgctttatgacacttagttgaattctttcttctgaagaagcaagaattgaggctgcagcaggcttgtacagatttgctgccattaatatagtttagtgccattctacatgatagaatatatatattcttatatttatatatatatatatatataaaatttatgtattcatagaggccttgaatctacattcttgctgcactttatgtaaacaatccaggtataagactaaaacttattttggaaatacattggtcccatatgatttctatttcataaaaatgggagacaggagggggaaaattatttttcagaagaaaacaacagaacaatggttattgaattttagatctgttcatttttttttaaattttgttatttacctacaatttggactgaatcctaaattttttcctggctcaaatttcaaaactaatggtttcagaattttcttccatttttcttccattttggtatattataaattaaaactgtgatttttaaatttttatcttttttattacacttttaagttctgggatacatgtgcagaatgtgcaggtttgttacataggtgtacatgtgccatggtgttttgctgaacccattaacccatcatctaccttaggtatttctcctaatgctatctcttccctagtcccccacccctcaacaggccccagtgtgtgatgttcccctccctgtgtccatgtgttctcattgttcaactcccacttatgagtgagaacatgcagtgtttggttttctgttcctgtgttagtttgctgagaatggtgtttccagcttcatccatgtccctgcaaaggatatgaactcatccttttttatggctgcattgaattccatggtgtatatgtaccacattttctttatccagtctatcattaataggcatttgtgttggttccaagtctttgctattgtgaatagtgctgcaataaacatatgtgtgcatgtgtctttatggtagaatgttctataatcctttgggtatatacccagtaatgggattactgggtcaaatgatatttcttgttctggatccttgaggaatcgccacactgtctttcacaatggttaaactaatttacattcccaccaacagtgtaaaagcgttcctatttctccacatcctctctggcatctgttgtttcctgaccttttaatggtcaccattctaactggcatgagatggtatctcattgtggttttgatttgcatttctctaatgaccagtgatgatgagctttttttcgtatgtttgttggtcacataaatttcttattttgagaagtgtctgttcatgtgctttgcccactttttgatgggcttgtttgttttttttttcttgtaaatttgtttaagtttcttgtagattctggatattagccttttgtcagatggatagattaaaccttgcaagctgaaacttgacgacttatgtaaacttctggagaaatcatagcaacttatatataaacaacctttgtgcctgctgatgtgtggactacacaaaaggtacacatgaacactgtattcagactgcaattcagaaaaatgtgtcagattgccattgcaattggaagacacttcagaaactctagaaaacctagtctatacagttagagcgatgtttgccaaatgaattcctctaattgaagcagcagttgtgtgactttaataaggttccaggattatactgtcccttttttgctgtgacttccctttgcccttttctgaattgtcttcatccccttttccacggggcatgacttcttaagaatgagccttcctagtgatgtaggatcagatggaacatacagtcacaaagtcatgtcttctacaatgatttctctgaaagcttttgaggaattgaggggccaggtgtgctggcagaggcctgtaatcccagcactttgagagtccaaggcaggaggatcacttgaaaccaggagtttaagaccagcctgagcaacaaagggagaccatgtctctacaaaacataaaataaatcaaattagccaggtgcagcggtgcctgcctctagtctcagatacttgggaggctaaggctggaggaccgcttcagcccaggagttcaagactgtagtgagtacactccagtctgggtgacagagcaaggttttttctctaaaagaaaaaaaaaaaaggaaaggaaaagaatagggtaaacaggaaagccaaagatcttgggcatctccagatgtttgcctgaacaaattgttttttcttggcttcaaaacctttcaagatgcatatttctttgtaaaagaaggacatacgaatcgtaactttaagtgagcaatcaaaatctaggtcctaaaactgaagtattttaactctcattctgataatatttattttctgaggcaaagaagaaagacaagattagatcaattgtttctctgcccactccatctcttccaacttgccttgtcccctttaatcaaatgtataaatactaagcctcctgaaacgtcttcagagaaaacacaagccacagaggttttttgcaactcatgtattcccagggtgcactgtcaagctctggctcaataaaactcaattggtcaagacccttgcctcagtcagtcattctggataaccaccatgagtcctgcaaagcccttcagtaatctattgcctgcctaggtgatgtgtacctaggtgagtcagatcttcatgagtccaacactcgtcttccttttctgtctttcccaaccctaccactcagtgctgtgtgctctgatctgaccccagctcccaggttgtttgtattggtctaagaaagcaagaccaggaggggcaggttgagaaggaagtaagaggccaactgccatggaaagtggcaggtggggctgtcattgctcaaagccacacactctgggtgcattttatgaatttttctggattcataatcttctccctctgtgtctatctagaaactcaccctcctcctactttcttctcattactctttctgtttctagtgcactcatttatggccagagaatggccatgcaaatagttgacaatagaataaaaaatgacattttgtgagacttggaagctggcctttcttttttctaaaagagattgaggtttctaaaagctagcttttatggagggctgtgcagttatgattgtagttttacagaacaggtgcataagtgaagggtgagacagaaaacaaaatgctggctgtttgtcaaatcctgaaagtgaatgggacaaaaatcatgtttgaaggaggatgtcattcaggagaccttgtacatcttagagtgtcctcttaccagatgaagtggaggatgaggttgaattgtggggttaggtgacagtgggtacatacttctctgcctcagtttttgttttttttaatctgtaaaaatggggattgtggcacttgggatcttttggtgaggagtgtagttacctggaaagctcttaggatagtgcctggtacatagtgattcctgcatcagtgtgagctattataattatgggaatagaaaaaggtgccaccctggacatccagagtggggagatgttttccagtcagggtccaggcaggccagctggagacgaagctgattagtggggaagcttaacttccaggagtggaagaatttaggaggagtaaacagaatgcacaacatactgtaaacattcctttacccaacagtaggaatactcagagtgggtgtgtcttccgtggcaatcattatctcctgggaatctaagaatgtgtcctagagtcaaatggctttgatgtaagccaaacccagaaatgggcttcagggctgccttgcacatagcattcattcatcttgaaaaaggaaagcattcatcttgctaaaggaatcccctcttctggcccagaccattatttttgtttttttactatcctaattttaagatgtaaggagaaagactgaagaacaaaataatgaagtacatgaatgaaataacagggtagaattgagactggtatgtgtaagttaagagaaattgtgtataaattttgtgtgaacagaaaattgatttcttgttgcaaacagacctctctacataaataatacctcctgccttgagtggatagcagacctcatcacaagaacattccagcagagtcatgagagaatgggtagtgtggcttctttaattggcaggttagactgagtaagttactgaagagaaagaagttgaaggagaagatgggtgagggcaagaaaaatgggaaggtgaaaggaaaggactgaaaggaatgtttaccaagggctcatcaggtaccaggctctgtgactaatgtcttacacatgttaatttactcttccactgtcattttctgatgcggtaagagtcagtcttacactacaggtgaggaaagaggctgagggaggtcaaatgagtggcccagggtcatccagccacttcatagcagagctagtgtgtttcactgtggtttgtgcagacagaaaagtgagacatggaaggaaggcaaaacatttttgttgtgggtgatgtttatgaaagtgacccatatgaggcagaataatggcctcttaaaaatgtccacatccgggccgggtgcaggggctctcacctgtaatcccagcctttggaaggctgatacgggtggatcatgaggtcaggggttcgaaaccagcctggccaacatggtgaaaccccatttctactaaaaatgcaaaaattggctgggcgtggtggcacatgcctctaatgccagctacttgggaggctgaggcaggaaagtcatttgaacctgcaagggggagattgcagtgagcccagattgtgccactgcactccagctggggcaacatgagggaaactctgtctcaaaaaaaaaaaaatccacattctaactcttggaacacatgcatttacttttcttggcaaaaacactgtacaaaggtgatgaagttgagtatcttgagatggaaagcttattctggcttatctatgtggctcccagtgtcatcataagagtccttgtaagtgaaagggaaaggcaggaggggccgggtgagaatgatgaggcctgagagactccactggccgttgcttgctgtgaacatgtgtgataagacaaaattacaactaatttagttatagatgtaattggcttttatttgtgatttatgatttggggcagctctccctctacagatgcctcagcatcccaagtagctgggactatattgcaggatctgaccagaagcctgcaatgcaatggggctctttctttgttcccaggcagatcggcaggttgagaaataaaaggcacacacaagatagtgaaagccatatcgagaggggtcaccgccttctggtcctgcaatgctgccaatgcactggatataccagcatttattattaagtttagtgagagtggggataggttactgagggatttagggttatttataggctctccacaagggtcacattccattcccagagctatggacatctgcttttctgggataggaatcttggtaatgtgaaacctccctgactgcatgtccgttcataggctctctgcaggggtaagcacatcatgtgctgttagctcattctggcagcccaacctggcatttgtctttacacaatcctgcatgcagtttcatatttacaataatgaggagcatttcatcttttattccgtagcaatagtttcagggggtctccctacatctcccccttttctctgatttcaatgaaccatagcaatcatagcttggcactgatcacgattggattgaagaatattttttccaattttacacatgaacaataaaccaatagcacaaactgtctaaaacttcagcactgggtaaaacagttaagagtgcttgagaagcttcaaaaatctgttcttttagcttccttatgtctaaacttaaattatcttcacttccttgtaaatggcattttacgattcccaattgtgaacagactcattatattggaatggagttatacaaaaatcagaagtattccaatcacgttgcatttgtaatctatgttctaatctcataattctatctcccatccatataacagaagcacatcacgcgctgtaggctcattctggcagcccaacctggcattgtctttacacaatcctgcatgcaattttgtatttatcataatcaggagcatttcatcatttattctatagcaatagtttcggtgggtctccctacaggactacaggtgtgcaccaccatgcccaggtaatttttgtattttaactagagacagggattcaccatattgaccaggctgatcttgagctcctgaccttgtgatccacctgccttggcttcccaaagtgctgggattacagatgtgagccactgtgcctcgcccataaatcacacatttctttgagtttttgtaattccagcacaagagaaaccatttgatgtttgaagaatggctgcacacaaataaaaacatctgtggattgcgccacacgagggagactaccagtatgactatcaggaggaaaatatcgagtttggtatatacaccttaggcaagatgcaaaccaactacaataggatagatcaaagaagaagccagaagggtctagtcattttaaccaggcagcacatttaatgatttttacaactgactgtgtaatacccaatgtatttatccatatgcaataagaagtgtcagaaactgcacaggctccccccgttcagctgatagagagcaattctattatctagcattgcatgtctatgttaaattaaaacagggagtgagaataggcaagtatagaagtggaagcctaaaaaaatctccatacatttgaggaaaaagttgtgttacagatgcagctaatgtcagcctttgggtggattaaaggatctcttggtatgtaaaaatgtgtgggctgggtgtggtggctcacgcctgtaatcccagcactttgggaggctgaggcatgcggatcacctgaggttgggagttcaagaccagcctgaccaacatggagaaaccctgtctctactgaaaatacaaaattagctgggcttggtggcacatgcctgtaatcccagctactggggaggctgaagcaggagaatcacttgaacccaggaggcggaggttgctgtgagccaagattgtgccattgcagtccagcatgggcaacaagagtgaaactccatcttataaaaaaaaaaaaagtgtggttgacatgatatatctgacactgttaacttactctcagaagctacttcttgtgaaatcctaagtacagcattattctgggaagcaaaggagacaggcataagcaaggagaaattcagagaggtaagagtctcatcatgattgatagtcttgttctgacatcttgagaaaagctgtccacagtgtaaagtcatcaacttgttgtcgtggtttgcagtttgagtgtctctaagttatggtgttggacatttggtgagctcttagtggcccacacctcagacatgagggttttcccatgaaatttacattgagttgtccacctccaacttatatggcttcaggaacagagccactcttgttcttaatgatttcattggagaaaattgaattggaagaactaaaagaattcagggtccagtccagtctaccagtggattataaatactcaatgataatgaacagtggttcaatctggtaacaggtgtactacagtttttcttttcaacatagtttttctgtctataggagtctctatttttaccaaagataattccagtaggatgaatttgtttgcaaaataggttgagtctcaccgaacttgcccagattttttagctaagtgcggcaagagtagcaagggaccatagaggctctttttaaacttctctttgctagaagtttttaataagaatctcagattaaacttccaaaaacctcttgagactaggaagccaacccaaggcccgcttcagactttgcctgcattccctatgggtttattctatgtatattctcaaatataacatcccagtcaaagccttggtaatataaccaatgttttcaaatgtgtcctgttataaagagagcagattcttactaaacttgtgcaaataactttattaccataaacatatgaatattcatgaatagattcccaattctggggcactcagagagcaaaagcaaatgtttcaatttttgtttacaaaagtatactttaccaattgctgaagaaaaaaattcataaatctggaggataaaacattcaaaaaatcagcacattttccaataaaaaattatgaaaacattatccttttgttatttagtccaatgaaatggagttcttttcttctttgtcttgaatttcatgaaggtatcagcctgttcatcaaaattttgaaagttcttagtccagtggtatgatcttgaagttatcaggaacttgtattcaagagtccttttcatagtcttttccataaatctccttgaagaaaaagcaattttggactgtagctgattttaaatactttgaggaagaatcaaagcaactttctgggaatgacaaagatttaaaatgactatgtttaaaaatctaatgagaatttattatggtaaagacacagctcacatagaaatctagttacttctgtggcttatgacactatggtaacatatttgatttccagaaatttcatataatttttagaacactcatttttttaaattttttttgagatggagtctcactctgtcatccagactggagtgcagtggtgcaatctcagttcactgcaagctctgcctcccgggttcatgccattcttctgcctcagcctcctgagtagctgggactacaggtgcctgccaccacacccagctaattttgtttttgcgtttttggtagagatggggtttcactgtgttagccaggaaggtctggatctcctgaccttatgatccacccacctcagtctcccaaagtgctgggattacaggcatgagccatcgcacccagcctagaatactcatattattaacattcccataaatattatttagagaaggtttagcatcacttatcccttatttgaaaatgctttctatataatgtaatatataaaataaggtggcttttccattcagcttctgtttctcaagaggattactgagttcttggtgtagcccattcataaatagggccaaaaaggtatagtcttatgtatgttgaaaaagatccttaggtaattccagtacttctagctgaaaatcattcatttagttttaagttctacctattgcaacaagagttctccatccttgttacatgttagtagtgtcagggaagacttaaaaattaccaatgcctgggtccgtctccagacctttaaactggaactaatgggtggggcttgagcatcctcttttaaaaatgttttccagtgattccaatgtgtagctctatttcccatcagatttctctgatttcttgtggcattcaattttttctattttggtatcatgattattttcaggtctcatttcctgtcttaggctttgtgtctcctggggtggggcccttgccttcttcatttctgtatgttttttgaacacatgaactgatcatcaggaaaagatctcaaccacacataggttgtgtcctgagtctcaggttcacatgttaatcctaaagtctttgttctccacgaggtcagatgttgcttgtgatgaagggtgtggttaagtctgcagtgcagatggtggaagggatttcactctgtttttagacatagcattggaactaagaattttatgtctatatgggtgaaggggcagggatgtgtaggaagacagttctaattaggatggaggaattatactaggaagtagaggtaaaggaagtgagaaggcttagtaaatagaagaaatgtgaacttatcaaataggctagtgtatacccctggagattcttgattaagtgaattaactagattttagaaaggtaatgaggcagttatatgcaaggaacatttcaaagtctggagacaagaagtcaagcaatactttgagaagtggttgagctttatgggaatggagagaattacactattgagatatgttaaaaataatgaagaaggtttcaccatgtgaaattgtgtttctcatttgaatctgagaaacaaatgagcagaggctggagataattatgtctaaaagacagtggggtacagggagcataaaggccagggagaaagggaactgcaggaattagtgctgagaagcaggagttagtggatgaaggaggagatccaggcccagatacaggcaaataagtcatttccctctcccaagcatggcagtcagccctgcaggaaccaggataagagaaaaggtcatcatacctgccagtcttcctgaaatacaaaaatgacatcacggctgctacgttggattattgaaagcaaaagttcctaatcctggaggagctgtcatggaaagaaaagaaaagaaggaatgaaggtgatgttattttacatgggggagcgtcaggaacaagcatgtaacatgagatactgtataattgtttcttcaaggactacattatttctgttggaaaattgatgggagatgattatattcttgcagttttttttccctctcaccatgtttctcagttggtgatcagtcctctgtcaattctctactgcactcaggtattttggaaggctttcagacgtgagaaaggctgattgctattttctatgtcattggaacttgtcacctttgcaccttttcatggttgcatctttttctcagtgtctctgttgtggcagtcatgaatgagactctgtcagatctccatggcagggacctgattgacagaaggcccaggtcagtgcatttcaaattcaccacctcctttgcacagaaagcttctttcctacaggctcccaggaagggtgtgaaagcaagcctagttctctgaggctctctttaacgctaatgggtgactggttggaggattcctcatcagccttgcaaaaactcttagaattgcattggtacctaaaacttctttctctttctttttcacaggaatcagctctgcatagtggtctgtgggttctcctgtactaccttcatgcctgccccacattccctcacaggtgtcttccgtgataaattatcgtttaggtctaatcccgtcttggatgcatctcagttggtaaaaactaacataccaggcttgattctttgcagttagctctttatctttctctcccacaagtagtcagtagccttgttctagtgttttatgtgttacctctttttccatatatatatatatatatatatatggaaaaaggaaggtactgttgaggggcacttcctatgtgccaggccctgtgctaaatactttacctgtatctcatttaatccacacaataaccctgtgaggtagacattatttccattttgccaatgaaaagacagaagcttagcgtgctgtaaaaactttcctggtgtcatatggctagtgacaggtggatctgagatttgattctaggactatttgacctcaaggttaatgatgatgatagtaatatagtagctgacattggttcctctgtatgtggcatcttgtttcattgactgcatgaaacctttaaaagaatggtacgaagaaaacactctcattgcaattttcaggtgaggaatcagaggttcagagaagttgagtcttgtgcaagaaatttataactgtaaactcttacattaaaaaagaagaaagatctcaggtcaacaacctactttaacacttcaggatatgaaagaagaacaaactaaacccaagcacagtgaatgagggaaataataaggattagagttgatataaataaaatggagaatggaaaaagaatagagaaattaatgaaaccaaaagttgattcttcaaaataaaatcaacaaaattgacaaccattaactagattgactaagaaaaaaagagaaaagtttaaaattactcaaatcagaaatgaaaatggactctgagcatggtgggtcatgttttaatcctagcactttgggaggtcacagcagaaggatttcttgagaccaggtgttttgaccagcataggtaacctggggagatactgtctctacaaaaaaattaaaaagccaactagctgcgcatggtgacatgcacctgtagtcctagcatcttgggaggctgaagaaggagaattgcttgagcccaggaggttgaggctgcagtgagccataatcacaccactgtattccatcctgggctggcctacagagtgagagtctgtctctctctcttaaaaaaaaaaaaagaaagaaaaatgaagcgattactaccaattataataaaataatgattatgaaagtactataaataattgtatgccaataaattggataacctagatgaaatagacaaactcctagaaacacacaaaaatatgaataaaactataatcagtaacaagattcaatccataaaagcatttgatgaaattcaatattttttcataagaaaaacattctaagaatggaaggaaaccacctcaacataaaggcaatatgtgaaaaacccaatgctaacatcatactcaatggagaaagactgaaagcttcccctctatgagcaggaacaagacaaggatgcctgcttttgacacttttattcaacatagtattgaaaggtctagtcaaaaaaattaggcaagaattttaaaaaagacattcaaattggaaggaaggagtaaaattatttctgtttacagataacttgaacttatatgtagaaaatcctaaaggtggaacaaacttattagaattaataaataaattcagtaatgttgcacaatacaaaatcaacattcaaacatcagttgtatttcaatacactaaccatgaacaatctgaagggaagttaagaaaaataatttcaatttatattaacctcaaaaagaataaaatatttaagaataaccaaagaggtgaaatgattatacctgaaatctgcaaaatattgctgaaagaaatgaaagacaatatcaataaatggaaagacattttgttttcatgaattggaagactcaatattgttaggaggacagtgctacccaaagtgagctgtggattcaatgcaattccttcagaatctcagtgacatttttgcagaaaaagaaaaatctgtcctaaaatttatattgaatctcatgactctaaatagacacacagctttgaagaggaagaatgaagctggaggactcagacttcctgatttcagcatttactacaaagccccagtaatcaatacagtgtggtactggcataaaggaggacatagaaattaatgaaatatcatagcccagaaagaaatgcttgcatatatggccaaatgattttcatcgagtgtgccaagatcattcaatggggaagggacagtgttctcaccaaatggtattgggaaagctggatatccaagggcaagaagagtggaacctttacctaacaccatgtacaaaaattaacccacaataaatcatagatctaaatgtgagagcaaaaactatacaactcttagaagaaaagcttcatgatactggatttcacaataattccttggttgtaacaacaaaagcataggcaacaaataaaatcaataaatcggacttcacaaaaatcaaaaccttttatatatcaaagaacattatcaagaaagtaaaaaggcaacccatgaaatgataaaaatatttgcaaattatatgtgtgataagaaattaatttccagaatacatgaaaagctacaagtcaacaacagcagacatccaaaaacccaattaaaaaatgaacaaaggattaaaatggagttttatccaaggaaggaacacaaatatccaataagcccatgcaaagttcctcagcatcatgaatacttagagatatacaaatcaaaaccacaatgttacaccacctcacaaaatttaggatggttttgataaacaataacaatgacagcaacacaaaacaacaggtgttttcaagtagatggaaaaattggagctctagtgcattgctgatgggaatgggaaatgttacagccactgtaaaaattggtgtgctgtttctcaaaaaattaaacaatgaattaccatttgatccagcaattccacttctggacatactccccatagaattgaaagaaatttgaacaaatatttgtacactgatgtttagagaagcattactcacactagccaaaaaatggaaacaactgaaaagtccattgaaagataagtgtgtaggcaaaggaggtgtatctatacattgaaatgttattcaaacttaacaaggaataaaattccaatatatcgtgcaaaatggatgaaccttgaagatattatgctaactgaaataagccagacacaaaaggtaattattatataattccatttataaaagatagagtagccagttacatagagacagaaagtagaatggtgggtgctaagtgttagggggagaaggagtgagagttactgtttattgggtacagaggtttaatatggtaagaggaaaaagttctggaaatggatagtgtgatggttacataacactaaattgcacacttagaaacagttaatggtaagccttatattagatatatatagtgtctggtagtcttaccctctctataattacacactttttggcactgcccctttcctgccatgcagagccccaggggtgaatcttcctatttctccagctctgcatcagtcactgtactcagtgctgtgtcccacgtgctgtgcccacagcctcatacagccagtgacttcagagccaggacgcagctcaggagtctgccctgaggttgcttctcttcttatttccttgcagcctggcccgggggaggcttggcttgaactggcagctcaatttagccaaattcaggacaggccaccaggactctttctccacacatgctggtcccaccccaggttgagtgaggcagggccagtcaccagaggagcccggagcagagcaggaagcagagtctgagctgctcctccctcacccaaggggcttcctcctctcatttgggggaaaagtgtgagcttgtttcaaagcctcagatgttccttgtagttcatggaagaggtacaagaaaacaaagacgtgacagaaggggatgagttggtgacagtgagaagcaactcgatgttcagcactctccttcttgtccctctgtgaagcctcttctaccacatagggctcagggctgataaagccccctccctacctttctcaggccagacacaaggtcagtcatgagaaaacagaaaaaaaaggagaagagagtctgtagagacaaattgggagggttcaggaggagaatttgggatttgcctgtgcccatgggacacaggctgggaataaaaatgttttcctgactcttctctgaaagctagatagactccacctaaaaccctattgccaaggatgctgggatccacttaccaatgactctgattgtcaaggatgtggagctttcctcgccagtggctgagttacgagcagagcaagcatagagcccattatgctttggagtaatctgagggataaagagcttttgtcctgatagctgaaacttcccattaattgtccaagaatactgtgctggtgggttagagtttgcgaagcaggacaagtcgaggttctctcctgaatagtaagaggtgactgaagggaaaattctggggaggtctggaccatctggaggaaagagaataaagccacagttgatgtcatctgagggaaggggaagctccttgtctcttaaagggacacagtgaccctctgagccaagacacaccctcaagtcccagccaaaccccctctatgttcactgagctgaagcctgaagtattcacctgtttctcccaccacaagctgtgggccccaagtctcccatgacaagagcatcccctctccttatattcttggttaaggctgtgtctacccaagttttcccagggcagggagtcatggccacctcggatgtccaaaagtaaaggtgtctgtacttggaccggagagagactgagaggcctggcccctggtcgtttggatttaagctggtgtcctggcccacagaggaacaaaagatacagaggacattcagggtgactgagtcactgcggatgccaccatatcggtcccgtatttcacattgatagggtcctgtttcatttctcgtgacactgggtagaatgaggatcctgttttcaatgggtcgctttaccctgggactgaccgggaggctctgacaatttagccaccaaatgtaggcatagttctcactcttaggttcacaggtgaaggttaagacatccttattctccctggggtttaagttgttgatggtgatgtagggcatgggcagctttgctgtgtggataacagagagaagattgtcctgtgtggcacctttgattcctccacaggcatccttcaatcagagttggcatctcccacctctcagcccacccgagtccttgaaagccaatagctggtgcgtgtgtcacaagacagatgcatgatgatctaagggctcaaagactgtgaggccgcctgcttcatcttaggaaagcacagactttctgaagtgtcaattgagcagcagtgttgggtcatggacagatacgtcagtgggagtcacagcccctggtacccctcccagtccctccataatcagttgactggctggctcaccttgggttccttacctggaatgtgcaactgctgggccccttccaaattccatcctactttgcccccctagatgtgatttctctgcagcttccatttccaaggacattctagagatcagtaataatgggacttcccattgtcctgaaaccctgaagatactgagcagcctggcctgggactggatgtttcagcagaaataacacaggggagaccagagtcaagcctggaggtcagttcagtcatcaggcagtggaggcagaaagtggggcagtgttttgcaggtgtttcatgatgacttacttgaaccagtgacctctaaagatagagcagagcgcaaggaatgatctaggaagagtgaaggggataggcaagagctggtggctttggagcagaaccatgttccctgtcctgggtcctttaagtttcctttccttctgcagagggcaggtgaggaccatgtggatctttccagaaatacatgtggacatttgcaaatgcagaactgactggtggaaagggtgggaatgaactgctggaaatctggtcctcatggaccatatgtgtttgatggatatgagacaaatttggagaaaagttttgcaagtagtttctttcattggatattctactctctgatcccctgggttcgactactctagggacctcatgtaaatggattccagagtgaatatgagaagagactgctggttgccaggagctgggagtggggagaatcagaagttgttcatgggtgtgcagtttccgttatacaagttggggagtttctagagatctgctgtagagcttgatgcgtattgttcacacagattatttcttatgcataagacttaggacaaaaagtgttttggatttctgacattttttgattctgaaatatttgtcatatacttactggtttagcatcccaaatctgaaagattcaaaatctaaaatgcttcagtgagaatttcttttcagcatcagattagtagacaaaagtgggaagtgataagccaaatatattcttgcccttttttttctctcaccacatttctagcttggtgattagttttcggtgaattccatactggccatgctgcactcatatatatttgaaggctttgggatgtgagaaaggctgattgctattttctatgtcatcaaaactttccaccttttcatggttgcatctttttcacagtgtttctgttgtggcagtcattaataagtgcctgtcaggtcagatttaggacagagttttctaattctgcaaaaaatgttactgggattctagtaggggttgcattgaatctgcaactcactttgggtagtattgtctttctaacaatattgattcttccagtccatgaaaatgaagtgtctttccatataatgatattgtctttaatttctttcagcaatgttttgtagttttcaaggtataatcatttgacctttttggttaaacttattccaaaatattttattccttttcatgttaatgtgaattgaaattctttccttaatttcctttcagattgttcattgttagtgtatagtctaaagaatgatctagaaagagtgaaggggacaggcaaatgctggtggttttggagcagaaacatattccctgtcctgggtttttgattttccctctccctttgcagagggcaggtggctcttccctgatagctagatagacttccctggaaaacatagtgccaatgctccagggatccacttaccagggactatgatcctcttgattatgagatttgttccaccagtggctgagttatggatgaaacagacatagacccctctatatgttttagtgatttggggtatgaagaacacttgtgctgattgctggaacttcccaccaatcagccaagaatgctctgccagtgggtgagtgtctatgagacaggagagcttggggacttcccctgtatggtaataggtgtatgaggaagaaatggtgagggcatccaggccatctggagcaaagagaataaagtcacaggtgacattgtcagagggaagggaaaatcctggtctgtggaagggccacagtgaccctgtgagccaagtcgcaagactgaagtcccagccaaatcctcgctgtgttcactgatctggagcctgagacattcacctgtttctcccatcacaatctgtggaccctgagcctcccatgacaggagcagcctcttttctcccactgtggatcaagcctaggcctactgtggtttgtctggggcagaaagtcatggccagctttgatgtccagtggtaaaggtctctgtacttggacctgagagggactgagaggcctggcctctggccatgtgtatttgggatggcagcctggctcacagaggaacagaagatactcacggaggagattcagggtgactgggtcactgcggctggcactccctgagttccatatttcacattcatagggtcctgcagtatactttgtgacaccaaatagaaagagggtcctgttggtttcagacagctgcatcctatgagtcatagggaggctctgaccattcatccaccacaggtagcttgcgtccggagtctcaggattacaggttaagatcacagtctccatggcctccctggggtttaagttgctgctggagatggagggcttgggagtctccactgtgcagaaaacagagagaagattgccctgtgtggcacctttgattcctccaaaggcatttttcaatcagaattggcatttgccacctctcagcccacccgagtccctaaaagcccatggcaggtgtgtgtgttacaacacagatgcatggcattctgaaggctaagagattgtgaggctgcctgctttatgtgggagaagcacagactttctcaggtgtgaattgagcagcagcattgggtcatggaaagacacaggaccagcagtcatagcccctggtgcctctctgagtccctccatctccaactgcctgcctggcccaccttttggtcctgacttggagcatgcagtgctggaatcttcttagtttcagtcttacttttccccccaaggtatgttttctctgcagcttcccttgccaaggacatcctagagatggatgatggaacttcccattgtccttaaaccctttgggtactggaaagcctggcctgggactgggtacttcagcagaaataacacaggggagaccagagtcaagcctggaggtcagttcagtcatcaggcagtgcagccacaaggtggggcagttttcccaggtgtctcatagtgactgacttgagccagtgacctctaaagatagagcagagtccaaggaatgacctacaaagagtgaaggggacaggcaagagctgatagctttgaaccaagaccatgttccctgttgtgggtctatgatgctcccttcccccagtagagggcaggtgaggaccatgtggatctttctggaaatacatgtggatgtttgcaaatgcagaactgactggtggaaagggcaaacatgaactgatgatggaagtctggccctcatggaccatatgtgtttggtagatattagaccaatatttgggaagaagtcttgcagatactttctctcattagacattctaccctctgattctgagtttgactactctatgtacctgatatcagtggattccagagtgaatcagagtgtagaatagtagtttccaggagctgggatcaggggaattgggtgttgttccgtgggtgtgcggtttcagttatgcaggacgaggaggttctagagatctcctgtacagattcatgcctatagttcatacagataaagtgcttcttatgcagaaaggttaaaacaaagtgttttggaattctaattttttttattttggaatatttgcagtacatgtactggtttagcatcccaaatctgaaaaatttaaaatccacaatgcgccagtgagcacttctttttagcatcacatcagtggtcagaagtgtaaagttttggagcatttcagattgtggatttctggatttgggatgctccatatttaatactgtaattatcccataaaaagttgtcaggagattagacctcatgttgtgttctgactctagtaacaaaaaaaaaatttggaggaaacattaaaatgttttcataagtggaaatttttactgatggtctaaacatctaagatcaattgctggtagtagtatttctcttgagaccaacataaggtttaggtgtgccatgaattccagcaggatcacattatgctcaaagaaagatgccaaaggtgatttgaaattagcagctccttaagtagagagagtcccgttaaaaggacagaactggtcagtgcatcaattacataaaaggaggaaggatgccaaattaaaagaagtgatgtgtgttatgttagtaaatatagaaagaacttcctgcttctaatttctgtgcagttaggaaaaatggggaggaccccaaaacaggtatgtgaaatgctttcttcattttctgttaagctcaggaaacaccactagagtttaagtttgtgtgaattagaaggagtctaagtgagatgccaatggctcatgtgtctccccacacgaagaactccaacttatgaaaacggcatcatcatgaggaaacagttgtatgtggcacaggcagtaaaaccatcagatagcacccacctggccacctccaactagtccccaaaaccaccagtattcctcttaagtatgtgttacagcctttgtagttgtcccacagctacaaaattttaaaaatgctattgtcaaaacaaaatattaaatatgaagttgaatatgttgatccactttttttccctactctttttggactttcctgtttcagttttggaaatttctattgacacatcctcaagctagggattccttcctcagctgtgtgcagtctaccagtaagcatcaaaagaattcttcatttctcttacagcatttttattttttctgagagagactcttgctctgccaggctggagtgcagtggcatgatctcagctcactgcaagctccacctcccgggttcacaccattctcctgcctcgacctcccaagtagctggtactacaggtgcccaccaccatgcccagctaattttttgtatttttagcacagatgggctttaaccatgttagccaggatggtctccatctcctgaccttgtgcctgccccagtctcccaaagtgctgcgattataggcatcagccactgtgcccagccatctcaaagggattttaatgagttgttgacttttgagtttgttcagctttttacttagtgttagaaccgagtgacaaatttcaagcttgtcatatgcctgacacgaagccagaagtctctaggaagtgatcagagaatgtaagctccatagcacgttgacgatggagtcatgagtgaaacaggtgaaatgagctcatgggctttggagactgcaggcctgtccagcctctgacaccctggtgagtcagtgcagagattacaacagtgacagcaaactagcatggctgactccatctggcatctagtctcaggctggctgtcctcactcattcctgcacatagacaaggctaaccttgggagaaatttagtttatggtttaactttgaagcaagaatgataatagttcctccataaaactaacacccttactttgcccagggactgcctttgtcaaactagtgaaagaccatgagatttagattataagagggaactgaattctgctaaaatgtatgcacagtttctataatccctgactgctgcaatgtcatttggcaagggtttacaaaatttgtaactaattgctcctatagataacatcactattgtagaacgtgagattggtcttttgagatgcttctcattcttttgcattctggcaaccagctgacctcatccatacctatgactaatggctcagcccgtcatgtggtccctacctagaggcagattcaagcacaaacagatcatttccctccgcccgcatgattccatcaccaacaatcagcagtactcattttttagtcctgtgcccctgaaactatccttgaaaatctctaagccctgatccactggggaggctgatttcagtaataataaacctctgtcctcctgtttggcagacttggagtcattaaaatctttctttactaaaaatcaccatttcaataaatttgtgtgtttgtgtgtgtgtgtgcaggaggccagaagaacttgtctgacaatgataagagtggttggagggacttcctatccctgtcccatggtcttgtccacaggtcagcctcacaaaggggaagagcccttgatgggaatacagtggaagctcattctcttagtgacctggggacattggctcgagatgaagcctggcaggagtggcaactccaggtgatttctgcacctttcctatttcctgggaggtgggccaggccacagtgttagcgggaagggaatagaacagccagcctagttagagggagtgtctggggaaggcctaggggtgggggaagaagctgtgcaggacagggcttgccagtcagaatgaagtgggaggaagatgagggacacagagaagcagagagaggcagagacaccatggcagtgagcagtgagggagacactgacttcagagcccccaggaaccagctgcccccagttccacagtccaggaccaaggagccccgagaaccctctggtggccaaagagcttcagagttacatgaggtggggtggctttaggggcaagaggtagtggggggatgaaacatgggtgtcagcctctgaaggacaagggacaggtgtggctagaacctcctaggattctgcattcaagatccagtctctaaagaggttttggatcattcatttcttcattccattccttcatttgttatgtgagagctcctgagtgtgtgtctctcgctgggcctgtgctggtgtagggagtgagtggggaaagaaaacaaggtcctctccttgatcctctcatgacagtgacatggacactttgggaaacacagagtttcaggttcagtgatgggggttaagatctgagggggaggcctggacattttttttgcactgactttgatggttgaagcaggtgatttagttctggagtatagactaatcagctgaccatttgctctcactcctctgaggtttggatgcctaagaagagaggatttgagccaataaatgactatggggtgcttggaacccagtaagccctcacttctggtggaggagaggatgggcctgtggctgcagacagacctcatgtgaccctgatctcccctttgcgtttgtgtgactctgattcagtgactgtgccttcctgtgcctcagttttctctcaatcagataagttaaatggcaaatggactgtggcttttcatgctatctgtgaataaatgttaaattattcacagtcacctgacctaatgcttggcacagtggaggtgttcacacaagcagcatttattattaatttgcttccatgagaaagcacctttacgtcagatccctgtggacaagctgctaccaggtacatcttctctcttctgtttctgcttctgaggacattagactttctatggactgtcctaagcctcctaaggcagttggctgatgacctacaaagcttgtctttctgtcctctccactctgagtgtcaggtgaagaaagctctgtccttgcccagatgaggctctgagggctgagccctggctggtgaacagctccaggagacacagtcctcagacagctggtaaattcttggtcccagtaagccctgcccaagaagccacaacccagccctggaacaggctcctcagctttatctggaacaaggatttaggtacagagttctgggtttgaggcttctagggctgagcttctctgagagtatctcaggggcccctcaggtcaaattctactcagttctccagggtctttctcagggtcaaatttatgaagagggcatgaggtgcttggctgagactgatctcctcctgctgagtccccccatcagactgtccttcctctgcagcgagtgtctgcagggtctggatgcgggaaaggaattctgatctgttgaaatttgtctcctctgtgtgtgtcctgcactaaatgcccaaaccccagcatgggacataatgcagagagggacacaggcaatgtccaggcctgacaatcctgtgtgtgtgatgtagaagtgacccctgtcccccaacacccagggatcatgtggaatcacttacggtataaggtgaaggtgaaatatccagttactcctctagtcccatcacctcgctttatgatgtgtaaggtgtaggatcctgcgtcctcccgggtgacattctggatcagcagggatgcattggaatatactgtttctcgtccactgtatgccggtccatatataattatttgaccgtctactacatatgatgtaatgtaatggtagaggtccctgatttgccctttgtaccagatgtagccagtaagattctggggcaaattgtggacaagtagaagaacatccttcccctcggacactttgggtggctgggcttcaatcatgacttgggcagtggtaggcaagttccagaagtttaaaagtaatgctaggaggtggagagagcatcagtcaatattgagacctatgtattggggtgaaaagatggggccctgagtcctgagaaggtctcttcaatcctcagccttgaagacacacacacacacacacacacacatacaaacatacacacacagaaaaggggcatgtgtgtttgtgtatgtgtatgtgtgtgtgttctactgtcctactaggtcaaggtcagcagcatgacccccattccttcaacacttctgaccttggcatttttctgtttggaatcctcttccccaggggtccgcatggccccctccacactgccctcaggtcctgctcacatcagggcatccttagacttctttcctgacacctccttcagggactctgggtcttccctttctgacctttccctgctctgctccctccagggttcttgtcaacacctgacctcacattctagatctctttgcatgtctgacttcctccccatggcagcatgagctccgtgaggacagggacttttgtgatcttggttgcaccccagtgcctggaacaggctgcagactcctgtagatgtgagagttctcagggccgtccacgccctgggtgtttttttttttttccccaattgttgaggttttttattgaggacagtgtttcatgccctgtttatttttatttgtagtgtcatctgatatagttattattatcatttttcaaaatgtggtggcccctgatgattaatcaggaaaacagaacacctgtttcctacctcttaccaattccggttcaatgtgactttcctgttttgacccctgtccctcttgggtgtattttcccctatccaggcatcaacagggccttctttcctttttttttttttttttctctttttttttttttttttttttttgagatggagtctcgtactgtcacccagcctggcgtgcagtggcactatctcagctcactgcaacttccgccaccctggttcacgtgattctcctgccttggcctcctgagtagctaggattacaggagcacaccaccatacctggttaattttttgtacttttagaagagacagggcttcactctgttggctggactgatcttgaactcctgatctcgtgatccacccacctcagcctccctaaatgctggcttttttattttttagaaccccaggagcctctccaggagaccccatccagtcactctgcttcctcctcctgtcctctcccaggaagttctctcctcacctgtgagcaggagccccttccatttgatgtgctctgtgcagggaggggctgagaggggccccatgatctctgctgcgtgcatgttctcctctgtggagatgagcctaggatccagaagcttccagagcacggctgtcagctgtgctgtccttcctccttctgcgctgagactcttcccggtggaaggagcacttctcaagctcatgggcagggtcaggccgaggacacctctctgtcccctcctctctcagccctgcctccttgtccctccttctgtttttccttttgtctgtgtttcaggtccctgggaattgtggaggcctctgcctttttcagcagtgattctttcaccaaacctcaatacacactttgtgcggacacacacatacacacacacacagaagagacacacacagacccacacagtcagacacataccctgcaggttgggcaagcagagtcctgggcctcagcctcctgctgtccccattgctcttggtcggggtgcacattcacaccctttgccctctttcatccccgtctggctctccccttcagtgcaggaggctggagctgcaccaggtccctgtcagagtgacaccccattgtgctgtgggtgagctgtgtgttgcctggtgagagggacccttcttttctccaatcgtgtctagcttggctgcagcttccaaggatggacattgaggacctgggtttcccagaggaaactgtccttcctggaggtgtgcagggtgaatctttcatgcctcctgggaggagaggcctgtgctggttgctcagtgggggctgtgagtcccatagtcaaagggaaagttctcggtcactctgtgactccatggggtctggcagctgagctggagctcttggtttctcatgttcttcctgacaatctttgatgtcctttcttctctgccgagctgattgtcctgtggtcaccacaccttccccgtggtggtgcaggaggaagtggggagttacccaggaatcccgcgggacatgacttattgagacgcaggaggaggagcctgggacagagcaggggttcagagctggagagattcatcccgacttactccgtggccatgatgggctcagccctccatgtgctgagatacccaggggtctgtcctgagggttttgacctggccaagctgctgtgtgtagaggaggaacaggcagtggccagagatcctgtctggagggacgtagctcacacctgagagggcgggtgggggtgagttgtgttctgggagcaaagagcaataacaccccccttctccccgcaagcacacgggagacgtctgtcttcccaagagacagctgggggtaggtggccacatcccggatggtgcctgtgtgtgaccatcacacgcgctctgagccctccggggttcagtgagcaggcaggtcacagggtgcctggctgattcccggtgaggctgtgggccctcaggcagccgctattctgtgtcagcgctaagcttggcctgggatgccccagtgaacaggacagatggagcaggggtgggcatttagggagcagtgacagaaagagttgatgttgatggagggaggtcacgaggggaaagcgcccagtgtggcatcgcgtgcaccagcgctgccctgggagatgcctttagctgggcccagggaaggagcaggtgtgtggggcaggaactacctgtagggggagtggtgttaggttggtggcccccaggtcagggaggagctgacagagaccctgtggggagcatggagggcgctgaggacttagtccgaagtgaccctggtgagggtggaccctgctgggctgtgggttccgctgagggcggttggcatcccttgggaagactccaggccgggagggactctgtcgccttctggtggacagggagggaagtgtgaacggcagcaatcccaggccaggctgcatgttttattctacgtggatctgcacacttcacacaaggtcacacatatgttatgttatagctccttcaccttccagccccgtgagtcccagtctgtgtggctctacgttcactgttctccctctttcacgatcagatatcccaaacgcagatgtttgtcactttctgtgagtttgtgtttgtgtgcagtaggcggcactgtgtataccctgggggcagtgatgtctggggctgagcgctgcacttgggcttgggagaagaagacggagcagcagggtgggaagatcaatgtcaggggggcagggacatcattttcattttctcccagggaccagaacccacgattttgactccagggcacagtaccacaccctgctggtgtccctggatgtcatgatgctcatagtgtcatgttgccttggcattcattttttaagttgtaagtttatttgcctcaaatcagaggcagggcttggtcaccatggcagttttcaatactgtatctggttcaggtggctccagttggtgtccagagataaaatcttagaggcatctctcctgcttggtgtgctggactcccctctctccagctgctttctttaaactgataattctgacattcgccctcatatttaaagtgaccacctctcagtcacagcgtgagctcctggtcccagtgtttgctgctttctttgaacacatccattaaagctccctgctggaaatctgtcatataacaccctggacttaataaagccattggcttaccagtctcttctctcctccctgcctgggctcactgaactctgtgtctgcggtctccaggtgtgccgagtgctccctagtgtctgtaagtagtaaaaatactgacattttcactttgtggttgtatcattgtagcctcacatgccatccagaggctgacattgaggctgccctatgggacctgtgctggttgagcctctgctggagctcttgttttggggcctctggtactcctggggacaggagcttccaggtaacttgattgaaaaactcatgcctttcattgaaacactgggtcagatgatgtattcatgggcttcagctgccataacaaatgccttagcctgggtgaattacataacagaaatctatttttcacagttctgtgaataatgtgctattctaaccactttaagatgcacaatcaagtgaaattaaccacatacacagtgttaaattaccatcaccactatttttcctagaaaatttttatcactttaaactgaaactttgtatctttcaaacaatacctccctgtatgttccaccctagactttgatcatctctactctgtctctatgaatttgcctattcttgatgtttcatataaatggaattatacaatgatgttattttgtttctgacatatttcacttagcataatgtttccatagtccatgcatgttccagtgggtgtcagagcttcattcctctttatggcagattaacattctgttgtatgtgtcaccatatttatttattcatgcattgatgagcacttggattgttttcatatttaatcttttgtgaataatgctgcaatcaacactatcatgcaagtacctgtttgagtcctggatttaattctttgggtatatacctaggaatggatgttgtttcaaatgagaattatatgattagctttttgaggaacagcaaaactgtttctcctagaggctgtacctttttatattctcacgagcaatatatgaggattccaaattctacataatactgctacttgttatttaacattttaaaagaatggtaaccagttttgtagatgtgatgtggtgtctcattgcagctttgactttgtgttttcctgatgactaatgatgttgagtatcttttcatgtccttcttgactctttgtatatcttctttgaagaaatgtctatttgactcttttgcccatttataaattggatgatttgtcctttctttattgagttgtagctagttctttatattatctgaacatgaaaactgcctatatgtggtttgcaaatattttctctcattctgtgtctattaattactttcttgataatttcctttgatgtacaaaatgctcacatcttgataaagcccaatatatcttgtttttcttctttctcatgcttttgtatcatatctaagaatccattgcacatttgaggtcatcaatatttacctctatgtctactttgagatgtttttatggttataggtcttatatttaactcactgatcaattttttagggaattgtttgatacggtgtgaggtagagttatctaaattcactgttttgcatgtggttatctagttgtttctgcactatcattagaaaggagaattgttcctccattaagttgtcttgacactctcttcaaagactaattgaccataagtgtgagggtttgcttctagactctcaattctatcccatttgtctttatgttcattcttttgccagcagcttgttttaataattgtactcctttgtgagatttcaaataagaaagttcaagtcctacaatttattttggcaagattcttttggctattcagggatccttttttgaaaggtggggaggcgaatgtttcaccattgggaaagccttttctgtcttcttcatggggaaatttgggagagccttttaaaaaactttatctaagtaggtaaactgtcaccactttatttgctgaagtgctatgttaaagtgtgccttgcctcttgtggaagaattgtgagaccctggaagcacttgcccacgtggtgagagacagtgagttccacgatgaggggcagagaggacattgttttgggatacaatgttgttgggggaggtgtatacatctcaacttctttatgtctctgtgcagtgggtgtagggagcagccccacagggtcggtgggtttttctccccatgtgcagagatgagagattgtagaaacaaagacacaagacaaagagataaaagaaaagacaactgggcccgggggaccactaccaccaagacgcggagaccggtagtggccccaaatgccaggctgtggtgatatttattggatacaagacaaagtgtcaggataaggagtgtgagccatctccaattataggtaaggtcacatgggtcacatgtccactggacagggggcccttccctgcctggcagccaaggcagagagagaaagaagaaagagagagagagcttacagcattatttctgcttattacagacttttagtactttcactaatttgctactgctaactaaacggcagaggcaagtgtacaggatggaacatgaaggcggactaggagcgtgaccactgaagcacagcatcatagggagatggtgaggcctctggataactgcaggtggacctgagtaatgtcaggccctccacaagaggtggaggggtagagtcttctctaaactcccccagggaaagggagactccctttcccagtctgctaagtagtgggtgtgtttccttgacactgaggctaccactagaccaaggtctgcttggcaacaggcatcttcccagattctggcgttacctctagaccaaggagccctctagtgcccctgtctgggcataacagaaggctcgcactcttgtcttctggtcacttctcactgtgtctcctcagctcctatctctgtatggcctggcttttcctaggttatgattacagagtgatgattactctaatgttggaataaaaagtaattcctaccaactaatgattaatgatattcacatataatcatatctaagatctgtatctggtataactattcttttatattttatgatactggaacagctcatgccctgagtctcttgcctcagcacctgggtggcttgccgcccacaagtgggcacctccattggacacagtaggttttgaaatccttgtttatcctctggggtctgggtcttggcttacctgttagctgcagctgaaagaggtgtctgctaaggcaatgacacctgtggggagaagaagggttcagcagagtgaaagcagctggggctcagaaaagccaggaaagtctgactcttagaaactgtgggttagcagatgggtgtcctcaggggtaaatgggccatgccagtagccactgcagtggactggaagaaggtaagtgatgctgggtatcccatgttctgtctcagctctgcagctgaagatttgggccctatgctggtacggccctgcagcaggggaagggtacacaggaatggctgcatatcaggaccaagtccatgtcatcttcttaggcattgttactgcagatggaggattctgttcagagacctggcctggacacatgggagggcccaccccattcttttaaaattattttaagagaacagtattagcaaatgtggtacatgttttattctgctagaatcagcattactgtcacgttttacaacgtatctcttaggaaatcatgagagccatccacacaatgtggatttaaaggggactctactataatttcagctttcctactctttatagaaaccatcttctctgcaaacacacaggcaatatctctgtgttcatttctattgggagccctgtatgcaaggtggagagagccacatttccccgtgagatgttatgtaaaagtttgaggttgagatgacatatctgacactctgttgttaccctcagaagctactacatgtgaaattctaatgactgcattatcctgccaaatgaaagaggcatgcatgagcaaggacagttaagaggggcgagagcctcatcatgatggggagtcttattttgacatcttggggagaactgtccacagtgtgaagtcatcaacttgttgtcctggtttacagtttgagcatctgttgttatgctgtccaacattttggtgagttctgagtggctcacacttcaggtacaagaattttcccatgaaatttacattgagttgtcctcctcccacttatagggcttctggaacagagtgggtcttggtcttagtgattccatgggagaaaatggaattggaggaactagtagaattcagggtaatgtccagtctacaggtgaataataaaaacacagaaacaatgaacagagctgcaatctcataaccggtatactacagtttttattttccacataatttttctctctatgggcatctctagttttaccaatgataatttcagtagaataagtttgtttgcaaaataagttgagtttcttcaaacatagtctgattctttacataagtgcagcaagagtagcaatgagccagataggctctcttttaaaattttctttgctctaagtttttataaggaatctgagattagacttttacaaacctcttgagaataggaagccaaaccaaggctgacttcagactttgcctgcagttcatattggttcattctaaatatattcttaaatataacaacccagtcaaagccttggtaatataacaaatgatttcaaatatgtcctgttaaaaatagagcagattgttactgtacttgtgcaaatatgtgtattaccttaaacatatcaacactcatgaatagttgcccaattctggggcagtcagctagacagcaaaagtaagtgtttcaattattgttcccagaagtatagtttattgaactgctataagctatagatagattaaaaaaattccatgaatctagaaaataaaacatttaaagaatcagcaaattttcaaataaaaatcttaaaaacattatcctcattatgatcaattatttcaatgaaatcaatgtttttcctgcttggtaggcttagaattttctgaagatatcagcctgtttgttaaaggtttgtaagttcttagacagtccagtggtataatctgaaagttatcagaaacttgtattaaagtctacttgtcagcatcttttccataaatctccttgaaaaggaagcaattttggactgtagctgattggaaatgctttgaggaagaataaaaacaacgtgtgtgaatgacaaagattttaaatgactatggttaaaactctgatgagaattcattatgataacacagctcacataaaaagttcgttacttctgtggtacatgacattatggctgataacataattaatttctaggaatctcatacaatttctggaacaatcatatcagtaacatatccataaatataacatagagaaggtttagcttcctttactacttatgatttgaaaatgcttttcagataattttacatgtcaaataaagtggcttttccatgtagcttgtgtttctcaacaggattattgagtacttggtggaggacattaatgaatagggccaagaaagtataggcttatgtatgctgaaaaatttccctagataattccaatactcccagctaataatcatgaaattaggtctaagttttacctattagaacagctgttctttatcctggttacacattagtagcatctaggaagacttaaaaattaccaatgtctgagtctcactttagaccattaaattggatcctatgggtggggcttgggcatccatttaaaaaaacgttttccagtgattccaatgtgtagctgtatttcccctcagatttctctgatttcttttggcattcacttttttctattttggtattataattatttttctggtcttatcatctatcttaggctttatgttccttggggtagaaaccttgcttcttcgtttctgtatctttcatgaacgtatgagagggtcatcaggaaaatgttttcagtcacatgtaggttgtgttctgagtctcaggttttcacattaatgctggagtcattgttctctgggaggtcagaggttgcttgtgatgaagggtatgggtaagcccataatgcagatggtagatgggagatcaccctgtttttagccatagcactggaactaagcattctatgtgtatatcaggtggaggggaagggatgtgtagaaagagagatttagttacaatggggaattactctagggaatagaggtaatggaagcaatacaaattagtaaagagaagaaatgtgaacttatcaaataggcaagagtagatccctgaagatttttgaataggggagttaactagaatttaggaaggtaataaggcagtcatacacaaggaaggtttcaaaaactggagataagtcaagcagtacctctagcagttgttgaggttgtgggaatggagagaatgacacaagtgagagatgttaaaaaaaggatcaagagggtgttataaggtattgaatctgggagacaaatgagcagaggctgaggataatcatttgtaggagacagtggggtacagggagcatgaagaacaggggagaagagacctgcaggaatgagtgctgagaagcaggagtttagtgggaggaggaggagatccagtcccagatatgggcaaagaagtcctttccctctcccaagcatggcagtcagccctgcaggaaacaggacaaaaggaaaggccatcatacctgctagtcttcctgaaataaactacaccagggctggtagatcagagccacactggccagtactccaatcatgatgctgacagtggctctacctgaaaggccaggacaacttcctttcactgaagtatctgtcatggaaagaaaagaagagaaggaataaaggtgatgttattttacagtgtggtaccttaggaaccatcactaagtatgaagtagtttctacttgttcctttggggattacattaattttgtgggagggttgctggtagatgattagccaactatattcttgcagattttttctctctcaatgtgtttctaggttagtgatcagtcttctgtcaatttcatcctgaccttgctcactcagatatttttgaaacctttatgatgtgagaaaggctgactgctattttctgtgtcattagaactttctacccttccatggttgcatctttttctcagtgtgtcagttgtggtaggcatgaataagactctgtcaggtctccatggcagcttgtgtttctcaagaggattactgagttcttggtggagcacattaatgaatagggccgagaaagtataggcttatgtatgttgaaaaatgtccctaggtaattccagcactcccagctaaaaattgattaattaataatcaattgacttgattgacagaaggcccagatcagtgcatcccaaaatgacaacctactttacatagagtcctcactttcctgaagctcccagcagggaaatgaaagcaagcccagttctatgagcctctgttttattctcctgggtgactggtgggaagactccccatcagtcttctcatgctctgtttgaactgtagctaaatcttctttctcttttgccttcacaggaatcagatttgcctagtggtcccaaagctccccaggcttttttcatgcctgccccactttccctcacaggcatttttcctaatacattatcctgcatgtctaatctcatcttggatgcatctcagtgggcataaactaacataccaggtttgatttttttgcacttagcttttttctctctctcccacatgtagccagtaaccatgtcctagtgttttatgtgttacctcttttttcatgtgtatagaaaaaaatgtatatttccatatacttatttatacataatatatataataaaatatgtaatataaaatgtataataatttaaaacatatacatattttctatatatgtatatggaaaaagaggtaacacatgaaaaaccaggacatttacatataataaaattgacatatgttatatatgtatgtagtgtctggtagtcttaccctctctataaatacacaatttttgtcactgccccttccttccttcccatgcacagctcccatggccaaatgtccctatttctcaaagtgtgtgtcactcactgtcgtctgtgctgtgtcccatgtgctgtgtccacagcctcctagtgttttatgtgttctctttttctatatatatggaaaaagcatatacatatttctctctatagatttatatacaatatataataatctaaaaatatagaataacaatttaaaatatgtacatatttccatatctatgaaaaaaggtaacacataaacactaggccatttatatataaaatccacatatgtaatataaatgccaattttatcatatataaataagtatatacaagatacacttaacatatataaggtaaatttggaatgccctgaccagggccctctgtcagtcaagtccctgccatggaggccattcatggctgccacaactgagacactgagagaaagatgcaactatgaaaaggtgaaaagttctaaagtcatagaaaatagcaatcagcctttctcacatcccaaaaccttcaaaaatatctgagtgcagcatgtccaagatggaattaaaaacttcaatcttcaaaaggaaaaaggtagctggaggactcacactttcagatttcagcatctactgcaaagctacagtaatcaatacagtgtggtactggcataaaggaggacatagaaatgaatgacagggaatagagagcccagaaaaaaagcttgcatatatggccaaatgatttttgtcaagagtgccaagaccattccatggggaaaggacagtctttttaacaagtgatactgggaaagctggctatccatggacaagtatgagttgaacctttacctcacaccatatacaaaaaaatgaacccacaatggatcaaagacctaaatggaatagtgaagactaccagactcttagaagaaaacataaggaaaaagcttcatgatattgaatttcagaatgatttattagttacaactacaaaagcataggcaacaaaaaagggattaattgggcttcatgaaaattataaatatttatatgtcaaaggccattatcaagaatgtaaaaaggcaaactatgacatagggaaaatatctgcaaatcatatatctgataagggattaatttccagaatacatgaagaacactacaaatcaaaaacagcaaaaacacaaaagcccaattaaaaaatggacaaaggactaaaatagagattttattaaagaagatatacaaatggccaatgaggacatgcaaggattctcaatattactaatatttagagatatgcaaagcaaaaccagagtgatacacgacctcacacacattaggatggctttgataaaaacaacatgaacaacaacatcacgaaacaagtgttttcaagtacgtggaaaaattgaagctctttgagtattgctgatgggaatgggaaatgttatagccattgtagaaaaagtggcatggcacggccggctcatgcctgtaatcccagcactttgggagccgagatgggtggatctcttgaggtcaggagtttgagaacagcccggcaggcatggtgaaaccccatctctactaaaaatgcaaaaattagctgggtatggtggcatgtgcctgtaatcccagctactcaggatgctgaggcatgagaatcacttgaacctgggacgtggaggttgcagtgagccaagattgcaccattgcactccagtctgggtgacagagcaagatcctgtctcaacatcatcaacagaaaagaaaacggtatgtcagtttcttaaaaaaattaaagcattaccacttaaaccagcaattctacttctggacatacagccaaaagtattgaaaaatatttgaacagatatttgtacactgatgttcacagcagcattattcacaatagccaatgggtggaaacaaccgaaaagtctattgaaagataagtggatgaacaaaaacatatatccatactttggaatgttcttcaatcttagcaagggataaaattttgacacatggtgcaaaatggatgaaccgtgaagacattatgcgaagtgaaataagccagacacaaaaggataattattatatacttccatttatgtaagatagttagaatagtcagttacttagagacagaaattagaatggtgattaccaggggttaaggggagaaggaatgagagttatcatttattgggttcagaggtttagtatagtaggataaaaacagctctggaaatagatagtgttgatagtaacacaacagtaaattgcactcttagaaacagttaatagtaagtcttagatacatagtgtctggtactcttaccctctctgtaagtacacactttttgtcactgttccttccctgccatagagagcttctgtgagttaatctccctatttctccaagtgtgcatcactcactgtcctctgtgctgtgttccaggagctgtgtccacaaactcagacaggcagtgacttcagagccaggacacagccctattcccattttttaaagccttacccatgggaggcttggcttctactggccgctcgatttagccagattcagaacaggccacccaggcaccttatccacatgccctagtcccagcccgggtggagtcagggcagggtcggtcacttggcgagcccacagcaatgcagggagcagagtctgggctgcttctccctcaacaaggggcttcctcctctcatttgggaaaagggtgggcttgttttgaagactctgatgttcatcgcagctcatggagtacacacacacagacacagacacacacaaaggagacagaagggatgttttggtgacagaaacagcttgaccatgaggaccctcctctttctccctccatgaaggcccttatactgcatagtgcttggggctgataaagccatttccctacatttctcaggctggacccaaggtcatccaccagaaatttggaaaacaaagggaagagaatctgtagatatgaattgggagtgttcaggagaaaaatttgggatttacttttgtgcatgggacacaggctgagaataagaatgttttcctggctctttcttggaaagccagataggcttcacctgaaagcgtattgccaatgctccagcgattcacttaccagggactgtgattttcttggttgcgaagtttttgccattagtgactgggttatggacataacacagatagtccccactattctctgtagtgactagggggataaagagctcttgtcctgtttgctggttattcccattcagcagccaagaatactctgctgatgggttagagcccatgaggcaggagaggttgaggtttgaccctggatagtaataggtgtctgaagaataagttgtgggttcatctgggccatctggagcaaagagaataatgccacaggtaatgttatcagagggaatgggaagctcctggtctgtgaaagggacacaatgttcctttttgccaagtcacaaccccgaagtcccagccaaacttcctctgtgttcactgaactggaggagtctaagacattcacctgtttctcccatcacaagtgtggaacctgagtctcctaagaccagagaagctcctcccttcctgggcctacccaggtttgcctggggcaggaagtcatggccagcttgggggtccaggggtaagtgtcttcatacttggacctgagagggactgagaggcctggcctcgagttatgtggatttgggctggcagccttgtccatgaaggaaaagaggatactcacagagaacatccaggtgactgggtcaatttggctggtactcactacattcttgctttgacattcatagagtcctgtgtcactccgagtagagcaaggaccctgttgtcattggacatctgcagcctggaaatgactgtgagtctatgaccatttacccaccacatgtagattgtgccatgaatctcaggttcacaggttaagaccacagcctcctcatcctccacggggttgctggcaacatagggcttgagcagatttgctgtgcagataacagagaagattcccctgtgtggcaccgttgatttctccatgagcattttccaatcagagttgacatctcccacctctcagccaatccaagtccttaaaagcccacagcaggactgtgtgtcaaaagacagatggatgcatgattatctgagggctcagagaccacggggccacctgctctgtgtgggagatgcacagacttctgaagtgtgactcgagcagcaatattggtgaagtgtgaattgagcagggtcaaacaattagagtttgattaactttgtttaaattgagcagagtccaagtgaggcagcagtggctcatgcatctccccacccgaaggacctcaccttatgacaatgttgttattatgaatacacaggtgtgcaagaaacaggcagtaaatcaggcagcacccacctggccagctccacctggtcctaggaaccaccagtattcccattatgtgtatgttacagctttttaggctacaaaatataaaatacaatcacagaatataaaatatgctattgtcaacacaaaatattgaatatgaagctgaatatgttgttccactttttctcactcttgttaaactttgctgattcagttttggaagtttctattgacacacacttaagctagagattctttcctcagctgtgtgcagcctaccagtaagcccatggagagcattctttatttctcttaaagtgtttttaatctctagtatttcatttgcttctttcttagaatagtcatctctgtttaaatcacccatccattcctgaaaggtgtctcctttttccatcataatccttaaccagagttgttttaaatttccagtctgataatttcagcatccctaccacatctgtgtctggttctgatccttgctctgtctttcaaactgcattttttttttttttgccatagtctgtcttgtatttttttgaaaaccacacatgatgtactgtgtaaaagggacttgagtgagcaggcattcagtgacatggtggtgagtgtggggagggaagtgttctgtggttctggatgaggtctgtgtcctgggctgtgaatgtcacaagtgcctctcaggtttttctttccattaggtgggatatgatgacttgaggctggagttggatatttcccctccccctggccagttaagctcccatcaaaccccagctaattcggctgcagtaaaatagtttctcttaaatgtaggtcttaccaagaagaacataattcactgacaactttccaagtgtttttttcccttcttcctacaagaaggatgtggattctttttgaatattgactgtgagaacctggtagagctccaggagctaagagtcataaaactgtccccctactcccaggactaatccatccactgttgtgtttatctctgcgctgtgtccacactgagcctccagaatttcctcaattagagttcaggttttctgaccccagcactggttcccgctggggtttctgtgcctgtgtttctgctcaggtacggtgcgctgctctgtatttgcctgtgggtctctccaatatgtgggccagttagcactgagatcttgcttcctgagaaatctaaacgagttgttgatttttcagtttgttcagctttttacttgttgttagaactgcgtgaaaatttttaagctacttacatgcctgatggaaattcgaagtctctagggcatgacaggaggatatgagccccacagcaggttgaggagggagtcatgagtgaaatgggtgaaatgagcccgtgggctttggaaactgcagatctgtccttctgcctctgaccccctggtgagtccatgtagaaagtgaaaccaccattgcaaagcatatgatggagagaggaagctagcttggctgcccgcatctcacctctagcctcaaactggctctcttctctgattcctgggcataggccagggtaagcatgggaggaatttatagtttaactttgaagcaaggatgataatagtccctccctaaaattagctcctccttgtcgggggctaccttggtaaatctaagaaaagaccatgaattatgggaggggcccaaattctgctaaaatgcaggcatagtttctataatcccttactgctcaggagtcatgtgtccagaggtcacaagatttgtgactttcctagttgctcctatagatagcaagactactgtagaatctgagatttatcttttgagatgtttctcagacttttgcattctggcaaccagctgacctcatctagactcatgaccaatggctcaaccagtcatgtagtccccactcagaggcagattcaacaaatacataccattttcctacctgcatcatttcatctccagccagtcaacagtacttattccttagacctttgccccttcaaagtttttgaaaaaatctaacctctgagccattggggaagctgatttgagtcatgataaacttctgtcctcctgtttggcagccttgggctaagtaaaactattctttactacacatcaccttcacaataaattggctttgcctgtgcagagggcaagaacctgtcaggtgattgtaagaatggatggaggagtcactgatctctttcaggtggcctgtttcatgagtcagcctctcagagagaaagagccctggtctgggacacagtggaagctcattctcctgttggcccggggacattgcctcattatggatcctggcaggggtggctactctggctgattttggtgcatttttcatttcccagaaggcaggacaggcctcagtgtgagcaggaaggaaatggaaccatcagtcttgttagagaggatgtctggggaagtcctcagggtggaggaagctgtgcaggacagggttcatcaggtagaatgaaagggggatgcacttttttcactgaacacctttcagatgtctcactaactctggcctcactgggctctgcctttccttctgagccctgagccctgagctctgagccctgattcctgggagggagggagggaggaagggtgaagctgggatgtgtgctgtccaggtttcttccatctctggaatcttgaaagcgagggaccctaatgtgttaccacagaggagaccatgggaaaaagctgtttctcaggggtgcctggcttatgaattgaggggaattcagaccaggttggactcgtgaactgcagggaccctgttccatgtcagcaaccagctcctctagctcagtgtttctctctgtggctaattcttttgtgtgatttctgagcccatgctagagtcctcctcacgatgcctgatggtcagacctgtgtggggagacctaatgatggggtgggggtggtcttgtgtgtcacacagagtgtccagggaacacactttgtgactttctctaccccagccccacaacaagatctggatagtgggcttggtcagataaagtcagaatccatgggggagggtatgtgtcctggcagtgctgaggttcgtacctccagcttagttctcagtctctgcaaatacatttatgttgtgcatgtgctgttttctggactgtacttcttgaacctgtctgcagataatgtcatgagagatctgcatggaagtatatgagggctatcagattagggtgggtgtgttttacatagtgggtttttttttcaccaaacacttttcaaaaaattgtggttgagtgtgtatatagaaacacatacatacttatatttgttagatgtgtatatacgtatatgtgtatatatgtgtgtgtgtgtgtgtgtgtgtgtgtgtgtgtgtatatatatatatataaaatgtgccattttaaccgcttcacttaaggggagagagagagagagagaagagagtttctactaataccaaatctgggttaaataagggtggtcctatttcctggggttggccctcttccttaatgggctgtatcttgagcacagtgattcagttgaagaacagagaccaaattaaaagctacattgctaaagaaacaacaggtgctggagaagatgtggagaaataggaacacttttacactgttggtgggattgtaaactagttcaaccattgtggaagtcagtgtggcgattcctcagggatctagaactagaaataccatttgacccagccatcccattactgggtatatagccaaaggattataaatcaagctgctataaagacacttgcacacgtatgtttattgtggcagtattcacaataacaaagacttggaggcaacccaaatgtccaacaatgatagactggattaagaaaatgtggcatatatacaccatggaacacttatgcagccataaaaaatgatgagttcatgtcctttgtagggacatggatgaagctggaaaccattattctcagcaaactatcgcaaggacaaaaaatcaaacaccacatgttctcactcataggtgggagttgaacggtgagaacacatggacacaggaaggggaacattacacaccagggcctgttgtggggtgggaggaggggaaagggatagcattaggagatatacctaatgttaaatgacgggttaatgggtgcagcacaccaacatggcacatgtatacgtatgtaactaacctgcacattgcctgcatgtaccctaaaacttaaagtctaataaaaaataaataaataaaaccccatggtgaatttctattatttttgtgttaccttggcatctttttaatcttccttgaacataccaaattttttcttgaaaaagattaagttctctctctctctctttgctttgagatgtaaatgtgctatgtgttttctctaaaactcagtaaagccttcctcaggtaagcgttaacctttaccatttacaagaaagcaatttgaatccaactatcttttaaaatggtgggttttaccgatctcatgcctaaagccctaaaatcaaaattctaaaatctttttgtctctctctatctttatatgaacatacataagttatatgttttatcacatacatgtatatgtcacacatttatatactgttgacacatagtatcaaattaatgtaaaaataaatgagtactcagaaattaagtgaataagcccaaatgcttttctatacatgcgattttagtaaactttggtgaatatagttttaaaattgttggtaaaataaagtaagaatgtcttcataatttaatttatacgtttttgcctatgtctgttggcaggcaggtttatattgtctttactagatgttttaaggtcagcaaacacttgtttccatatatatacattttcttaatttgtctgtgagcttatgtctttatatttgaagctttaaattctgagttctagataagtgaccatagtaagaactggggacaaaacccatcccatcctccagctgtgccttttagccatgctgggagagatgagattatccaggcattttcttcatagctctgttctttgtcttgggctttgcatctggtacatagttagaacggtttactccctagttttttttctactgaaaataaggctgtttaagtctgtttttacattgctacagacaaatacatgaacccgaataatttataaagaaaaaaggttgaatggtctcatgattcagcaggttgtagagtaagcatgattctgacatctgctcagcttttgaggaggcctcagaaaacttacaatcacggagaaagccaatggtggaggaagacatcttatataatgggagctggaggaagagaacaagggttgcacactggtaaacaaccagataaaactcactgttgctataacagcaccaaggaaaatggtattaaaatatgagaaagcacctccatgatccaatcacatccaaccaggctccacctccaactttggagattacaatttgacatgagatttgggtggggataaaggtgcaaaaaaatattattctccccatcgtccctcccaaatctcatgtctttctcacattgaataatataagaatggcttcccaacagtctctagagtcttaactcattccagcattaactcaaaagtccgaaatagcaagtttcatctgagacaaggcaagttccctttacctatgagcctgtaaattcaaacacaagttagttactttcaagacacaatggaagtataggcattgggtaaatactcccattccaaagggaagaaataggccaaaggaaataggatacaggtcccatgaaagtctgaaaccttgcagcacagtctttaaaacttaaagctccaaaataatctcctttgaccccatatctcatattcagggcacactgatgtaaggcttaggcttccaaggttctgggcatcacaggaacattccaagagagtcacaaaagaatttgtagtgaggcttttgatgctaaagagcatattagaccgagtaagtcactgaagaaaaaaaagtcagaggagaagatgggtgagggtgacagaaatggaatggtgaaaggaaagttctgataaaaatgtttacctgctggacatggtggctcatgcctgtaatcccagcactttgggaggccgaggtgtgcagatcatgaggtcaggagtttgagaccagcctgaccaacatggtgaaaccccatctctactaaaaatacaaaaattagccaggcatggtggcatggacctgtaatcccagctactcaggaggctgaaggcaggagaatcacttgaacttgggatgcggaggttgcagtgagctgaaatcgcagcattgcactccagcctgggtgacacagtgagtctccatcacaaaaagaaaaaaaaactttacccaagggctcatctggtaccttgctctgtgactaatatcttacacattttgatttactcttccactttcattttctgatgcgcaaagggtcacccttctgctgaagatgagaaaagaggctgagggagctcaaatgagtggtctagagtcatccagctacttcatagagcttgtgtgtttcaccttgacatttgtgcacagacagaaaagtgagacaaagaaggaaggcaaagcaagtttttgttgtgggtgacatttatgaaagttacctgtgttggcagaataacggactcctaaaatgtttgcaacctagctctagaacctgtgcatttacttttctttgtaaaaacacggtgcaggggtgataaaattaaaatcgtaagatgtggacgttgttctagattatctgggtgggcccattgtaatcagaagtgtccttgtaagtgacaaagaaaagcaggggcatcagtctgagaatgatgagcctgtgaaactccactggccaatgctgggtgtgagcatgcatcaaaagacaaaattacaactaatgtagttatagattttattttttgtttattatttgaggcagctcttactctacaaatatagtgatagcacttcctgggctatacaataacaaaacagtgggttttgtcaagtgggaactggtaaacaaagccatataaataaataaatcagttaacattagggtacttcaggtcgcttttctgtaaaagttaaagcagaggaaacttttattatgctgtctcaggtagagtggaatctcctgttttcaacaaaaaacaaaggtctgttctggtatctctttgcttcattaaaatttcagttgtagactgtagcatttagcatgagtggttctattttggagtctctaggctctcacttaggtgggagtgtgaccaaaatttaaagcattggcattcatctcagtaaccatcatattgggcttccatcgtttataggtttatgatgtcttcctgatcacacatttctttgagtttttgtcatttcagccaaagagagaccctttggtatttgtagatggctgcacacaaaactttttaaaaacttttgtagaattcaccacaccaaaatgtagaattaaaaaacctgtagaatttatcacaccagagatgctactagtatgactattggaaggataacaccaaaagtttggagtatgcactttaggcaagatgcaaaccaactaaaatagaatagatcaaagaatgagccagaagagtctagcaattttaaccaagtagtatgtttggtaacttctgtgattgagtcattattatactcaatatatttgtttatgtgcaacagttggtgtcagaatctgcacaggctcctccctgttcagctggtagggaacaattttattatgtagcattcgacggctcattaaattaaaacagggaatgagaacaatgagtctgaaaatgtaactttaaaagcgccactgtacatttgaacaaacaattgtgttaaatatgctgctaatgtcagccgttgggtggactaaatgatatcttatgtaaaaatttgagggtgacatgatatatctgtcactctattacgctgctctcagaaactacttcatgtgaaattctgatgataccatcatcctgccaagtgaaagaggcaggcataagcatggacaaattaagaggggtaagagcctgattttgatgtggaaacgtgttctgacaacttgagaaaagcttttcacagtgtgaagttgtcaacttcttatcctggttttcaacttgagtgtctgtagttatggtgtcaaacatattggtgagctctgagtgactcatacttcagatacgagggttttcccgtgaaatttaccttgagctttccacctccagcttataaggcttcaggaacagagcagattttattcttactgattcaataagagaaaactggatgggaggaactagaagaattcagggtctagtccagactaccggtgaaaaataaaaactcaaaaacaataaacagagcagcaatttcatagcaggtatactacactttttattttcaacattattttgctctctataggcatatctatttttaccaaagataaacccagtaggacaaatttgtttacaaagtaggtttagtcttaccaagctttgccaggattctttacataagtgcatcaagagtagcaatggaccacagaggctcttcctaaagtttgcttcgctagaaatttttataagtagtctcagattaaatttttacaaacctctggagacgaggaagccaaatgtaggccatcttcagactttgcctgcagtacatatgtgtccattctatgtatattctcaaatataacttctcagtcaaaccttggtaatataaccaatgttttgaaacgtgtccttttataaagagagaagactcttactaaacttgtgcaaataactgtattagcataaacatatgaatactcatgaatagtttcccaatcctgggacagttaggtaaagagcaaaaataaatgggcttcaattattgcttccaaaagtatactttaccaaattgctttagatatagctagcttaaaagaaggaaaattccataaatctggaaaaaatcatttaaagaatcagcaaattttcaaataaaaattataaaaacattatccactttatcatttatttcaaggaaattatttttgttctgcttggtctaggttggcatatttcatgaaggcatcaacctgtttgttaaagttttggaagtctatagacagttcagtgatataatcttgaactgctcagaaacttgtatgcaagagtacttgtcagcatcttttccataaatcttttgaaatagaagcaattttgaactgtagctgattgcagatgctttcaggaagaatcaaaacaactatctgtgaatgaccatcatgtaaaatgactattgttaaaactctgataaagagcccgcatcgccaagtcaatcctaagccaaaagaacaaagctggaggtatcacactacctgacttcaaactatactacaaggctacagtaaccaaaacagcatggtactggtaccaaaacagagatatagatcaatggaacagaacagagccctcagaaataatgccgcatatctacaactatctgatctttgacaaacctgagaaaaacaagcaatggggaaaggattccctatttaataaatggtgctgggaaaactggctagccatatgtagaaagctgaaactggatcccttccttacaccttatacaaaaatcaattcaagatggattaaagatttaaacgttagacctaaaaccataaaaaccctagaagaaaacctaggcattaccattcaggacataggcgtgggcaaggacttcatgtccaaaacaccaaaagcaatggcaacaaaagccaaaattgacaaatgggatctaattaaactaaagagcttctgcacagcaaaagaaactaccatcagagtgaacaggcaacctacaacatgggagaaaattttcgcaacctactcatctgacaaagggctgatatccagaatctacaatgaactcaaacaaatttacaagaaaaaaacaaacaaccccatcaaaaagtgggcgaaggacatgaacagacacttctcaaaagaagacatttatgcagccaaaaaacacatgaagaaatgctcatcatcactggccatcagagaaatgcaaatcaaaaccactatgagatatcatctcacaccagttagaatggcaatcattaaaaagtcaggaaacaacaggtgctggagaggatgtggagaaataggaacacttttacactgttggtgggactgtaaactagttcaaccactgtggaagtcagtgtggcgattcctcagggatctagaactagaaataccatttgacccagccatcccattactgggtatatacccaaaggactataaatcatgctgctataaagacacatgcacacgtatgtttattgcagcactattcacaatagcaaagacttggaaccaacccaaatgtccaacaatgatagactggattaagaaaatgtggcacatatacaccatggaatactatgcagccataaaaaatgatgagttcatatcctttgtagggacatggatgaaattggaaaccatcattctcagtaaactatcgcaagaacaaaaaaccaaacaccgcatattctcactcataggtgggaattgaacaatgagatcacatggacacaggaaggggaatatcacactctggggactgtggtggggtcgggggaggggggagggatagcattgggagatatacctaatgctagatgacacattagtgggtgcagcgcaccagcatgtcacatgtatacatatgtaactaacctgcacatggtgcacatgtaccctaaaacttagagtataataaaaaaaataaaaataaaaaaaaaaagatgaaaaaaaaaaaaaaaaaaaaaaactctgataagagtttggtataataaagagagtaactccagccagtactccagtcatgatgctggcagtggccccaactgagagaccaaaagaactttcttgtcctgaagcagctgtcatggaaaaaaaaagaggagaaggaataaataataaagacagcaagggttttagccaattattttttgagatagggtctcactctgttgcctaggctggagtgcagtggtgcaatctcagctcactgcaacctgtgcctcccagtctcaagcagtcctcccacctcgctctcctgagtagttgggactataggcacacaccaccacacatgcttaatttttgtattttttgtagagatggggttttaccatgttgttgagggtggttttgaactcctggactcaagttatccacccgccttggcttcccaaagtgcagggattacaggtatgagccaccgctcctcccggtttcatgctttttataataagaatcaactctttatgtaataataaataaataaacagaaattatttgctttagatgtagcatatgtagatttagattgtccagagtcaggagctaagcctcatatttttttttttttgttttagctcagtgtagagtgcattgaaggtgttgtaaaaataattccatatagtaagccaactttaaaccctgctcacagccagatctgccaagtatgagccaggtaaaattaccaaaaacggtggttctgactgactccttaacaataacgtggcttacaaacaaagactgatatgaaatagttgatccaacccaaacactttgctcatttcccaaaattttctatacaaatatatacaacttaccacaacataaagatcataatgaaagatttgccttttattcctttaaatgaccatatgttcagatctgatgtactgacagcaataattctccattaagcagaaaactaataaaatttgaaaaatagtgattttatatttagatgatactcagatcttctgctacatatgtggaaaatggaattattgctagaaacattgtttaaagattagggtatgaaaggagtattaggaagtcaggtggttctttccttaggaagcagcttatctggattcattcaaagagctttaggtgagtttgaggtctttctgcaaaatgtaaattgctatctgagaaaccatatatagtccaatgatgaaagaatgcaaagccttagaagcaccggagacaattccagtatcttccctaaagttctgacaaaaaggaaaataactatcaaattattcaactcgaatgcttattatgtatgtataagtcagtcgtcagatgaagagaggctggaaatatgacttctacccctagggaactcacagtcttgtgggggccactaggggtggtggtgtgacctgcctggagcagggctaagtatggacttgtgagtcaagggctatcaaaacctaagtgaactgatggccgttcagagaaggtagagttccattccacagtttgcaagaaggacaatttcatggaggaggccacgttggactagacctttaaaagttggtagaatttaaaagcaaggatatggaagcaggaagagtgaaagtgagcagaggtacaggagtgaggcaagggtgagcagtgttaattttttaatggtggtattataaaacacacatcaaaatttgccatattattattattattattttggagacagtgtctggctctgttgcccaggctggagtgcagtagctcaatcatggctcactgtagcctccacctcctgggctcaagcaatcctcgtacctcagcctcctgagtagctgggaccacaaacatataccaccacgcccaactaatttttatatttttgggagtgacaagatcttcctatgttgcccaggctggtctcgaactcctggactcaaataatcctcctgccttaaccccaaagtgctgggactacaggtatgagccactgcacctgaccccatcttaaaaatttttaagtgcacagttgagaaatacatttgcattgtgcaaccatcagcgccacccatattcagagagtatttttcatcttgtaacagggaaaattcatatccatgaaacactaactcctcattcttcctcctccccaccccaggtaacaactatttcagtgtctctatgattttgactgctctagggacttacataaatgagatcatacactgtgtatctttttgtgactggcttatttcacttagcataatgtcctcaaggttcatccatgttgtaatatatgtgagaatttttttccttttgaaggctgaataatatttcattgtatggatagaccacattttgtttatccattcatctatccatggacacttgggttgccttcactttttggctactgtaaatagtgctgctataaacatggaggtaccaatatctgttggggtctctgttttcaattattttgagtttatgcccaggagtggaatggccaagtcatgcagtatctctaattttagttttctgaggaaccaccataatgtttttcacagtggctgcaccattttaattcttatgaatagggcacaagggttccaatttttccacagtctcattaacacttattattttctgggatttttgctttgcgtttgagagtagccatttaaattggcataaggtataatttcattgtggtttacattttcatttccttaatgattagtgatattgatcaatattttctatgcttgctggccatttgtatatcttctttggagaaatgtttatgcaggtcatctgcttatttttttaaattgggttgattttttttttttgctgttgtttaggtagagaaagcaatctttggataccagtgatgtttcactaattctgggccattgatttcacaagttgtatgaggtattagtatgtgagtttggtttcaatcatggctgaggttgaatgccttttccaaaattcagtgtgaatttcaccagaagccacaaagggtccaggagcaagaacatggtgtgactgctctgtgctaaagaatttcagcctgatgacagtgagcaggctacacatgagactgacacaagaacaggtggagagggagactttccactggaagaaggtgattctaacatgcagaatcaccttcaaggagcaagtaagcagaaaaatagacaatggcacagtggccaggcaagaagacactaggtccagaatctgaggttcaaatcctggctctgtgagataaaaacatgccttggtttccccatgctactgaaacaccaggggttgggtctaggtcccattgctcactgcacagaaagccaaccactgagacaatgagcattgccagggaagaaggctttatttgggtgctgcagccaaggaggtgggagatcagtcttaaattcatctctccagcccactcaaattggagggtttatatagctgggaagggaggtaactactagcagggaaaacagcaattaaggaggggtaaggaagcaatcatgataaatgaggagtctggtgtctcattgtctgatagtgatgtggtgagtttcagtctcttgcctgaaggtcggtttcctaactcagatgactgacaaatgttaagtttcaagttataagaccggatgggtcaatttctatgtttattcaaaaaccctgtaaatatcagttctatgtggaacttgagctggtttccccccagttatcacagttagggttaaatgatgcaatataagtaaaacaccagcagtttctgacacacacacacagagtgtgtgtcatttttttattacactttttattacacttttcattctgggatacatttgcagaacctgcaggtttgttacataggtatacaagtgccatggtgttttgctgcacccattaacccatcatgtacattaggtatttctcctaatgctgtccctcccctagtcccccacccctcaacaggccccagtgtgtgatgttcccctccctgtgcccatgtgttctcattgttcaactcccacttatgagtgagaacatgcagtgtttggttttctgttcctgtgttagtttgctgagaatgatggtttccagcttcattcatgtccctgcaaaggacatgaactcatccttttttatggctgcattgaattccatggtgtatatgtaccacattttctttattcagtctatcattgataggcatttgggttggttccaagtctttgctattgtgaatagtgctgcaataaacatatgtgtgtgtgtctttatagtagaatgatctataatctttgggtatatacccagtaatgggatcactgggtcaaatgatatttcttgttctagatccttgaggaatcgccacactgtctttcacaatggttgaattaatttacattcccaccaacagtgtaaaagcattcctatttctccacatcatctccagcatctgttgtttcctgaccttttaatgttcaccattctaactagcatgagacggtatgtcattgtggttttcatttgcatttctctaatgaccagtgatgatgagcttttttttgtatgtttgttggtcacaaaaatgtcctattttgagaagtgtctgttcatgtgcttcacccactttttgatgggcttttttttttcttgtaaatttgtttaagtttcttgtagattttggatattagccttttgtcagatggatagattaaaccttgcaagctgaaactcaatgacttatgtaaacttctggagaaatcatagcaacttatatataaacaacctttgtggctgctgatgtgtggactatacaaaaggtacacatgaacactggattcagactgcaattcagagaaatgtgtcagattgccattgcaattggaagatacttcacaaactctggaaaacctagtctatagggttagaacgatgtttgccaaacgaattgctctaattgaagcagcagttgtgtgactttaataaggttccaggattatactgtcccttttttgctgtgacttccctttgcccttttctgatttgtcttcatccccttttccatgcatgacttcttaagaatgagccttcctagtgatgtaggatcagatgaaacttacagtcacaaagtcatgtcttctacaatgctttctctgaaagcttttgaagaattggggggccaggtgtgctggcagaggcctgtaatcccagcactttgagactctaaggcaggaggatcacttgaaaccaggagtttaagaccagcctgagcaagaaagggagaccacgtctctacaaaacataaaataaatcaaattagccaggtgcagttgtgcatgcctatagtctcagatacttgggaggctaaggctggaggaccgcttcagcccaggagttcaaggctgtagtgagtacactccagtctgcgtgagtgagcaaggttgtgtctctaaaagaaaaaaaaaaaaaggaaaggaaaagaacggggtaaacaggaaagccaaagatctcgggcatctccagatgattgtctgaacaaattgttttttcttggcttcaaaacctttcaagatgtatatttctttgtaaaagaaagacatgccaattgtaactttaagtgagcaatcaaaatctaggtcctaaaactgaagtattttaactctcattctgataatatttattttctgaggcaaagaagaaagacaacgttagatcaattgtttctctgcccactccatctcttccaacctgccttctcccctttaatcaaatgtataaatactaagcctcctgaaacgtcttcagagaaaacacaagccacagaggttttttgcaactcatatattcccagggtgcactgtcaggctctggctcaataaaactcaattggtcaagacccttgcctcagtcaatcattctggataaccaccatgagtcctgcaaagcccttcagtaatctattgcctgcttaggtgatgtgtacctagatgagtcagatcttcatgagtccaacactcgtcttccttttctgtctttcccaaccctaccactcagtgctgtgtgctctgatctgaccccagctcccaggttgtttgtattggtctaagaaagcaagaccaggaggggcaggttgagaaggaagtaagaggccaactgccagggaaagtggcaggtagggctgtcattgctcaacgccacacacactgggtccattttgtgaaattttctggattcataatcttttccctgtgtgtctatcaagaatctcaccctcctccaactttcttctcattacactttctgtttctagtgcactcgtttatgtccagagaatggccatgcaaatagttgacaatagaataaaaaatgacgatttgtcagacttagaagctggcctttcttttttccaaaagagattgaggtttctaaaagctggcttttatgcagggctgtgcagttgtgagtgtagttttagggaacaggtgcataagtgaagggtgagacagaaaacaaaattctggctatttgtcaaatcctgaaagtgaatgggacaaaaatcatttttgaaggaggatgtcattcaggagaccttgtaaatcttagagtgtcctcttaccagatgaagtggaggatgaggttgaattatggagttaggtgacagtgggtacatacttctctgcctcagttttttttttaatctgtaaaaatggggattgtggtacttgggattttttggtgaggactgtagtttcctggaaagctctcaggatagtacctggtacatagtgagtgctgcatcagtgtgagctattataattatgggaatagacaaaggtgccaccctggccatccagagtggggaggtattttccagtcagggtccaggcaggccagctgtagatgaagctgattagtggggaagcttaacttccaggagtggaagaatttaggaggagtaaacagaatgcacaacattctgcaaacattcctttacccaacagtaggaatactcagagttggcgtggattccgtggcaatcattatctcctgggaatctaagaatgtgtcctagagtcaaatggctttgatgtaagccaaacccagaaatgggcttcagggctgccttgcacatagcattcattcatcttgaaaaaggaaagcattcatcttgctaaaggaatcccctcttctggcccaggccattatttttgtttttgtactctcctaatttttaaggtgtaaggagaaagaccgaagaataaaataatggagtacatgtatgaaatgacagggtagaattgagactgctacatgtaagttaagagaaattgtgtataaattttgtgtgagcataagaaggatttcttgttgcaaacagacctctccatataaataatacccattgcctttagtggatagcagaccgcatcagaagaacattccaacagagtcatgagacaatgggtagtgtggcttctttaattggcaggttagactgagtaagttactgaagagaaaggagttgaaggagaagatgggtgagggcaagaaaaatgggaaggtgaaaggaaaggactgaaaggaatgtttaccaagggctcatcaggtaccaggctctgtgactaatgtcttacacatgttaatttactcttccactgtcattttctgatgcagtaagagtcagccttatactgcagatgaggaaagaggctgagggaggtcaaatgagtggcccagggtcatccagccacttcatagcagagctagtgtgcttcactgtggtttgtgcagacagaaaagtgagacgtggaaggaaggcaaaacatttttgttgtgggtgatgtttatgaaagtgacccatatgaggcagaataatggcctcttaaaaatgtccacatccaggccgggtgcaggggcacatgcctgtaatcctagcactttgggaggctgatacgggtggatcacaaggtcaggagttcgagaccatcctggccaacatggtgaaaccacatttctactaaaaatgcaaaaattagctgggcgtggcggtgggcaactgtaatgccagctacttgggaggctgaggcaggagaatcatttgaacctgggaggcggagattgcagtgagcccagattgtgccactgcactccagctggggcaacatgagtgaaactgtctcaaaaaaaaaaaaaaaaatccacatcctaactcttggaacacatgcatttacttttcttggcaaaaacactgttcaaaggtgatgaagttgagtatcttgagaaggaaagcttattctgacttatctgggtggctcccagtgtcatcataagggtccttgtaagtgaaagagaaaggcaggagggtcagggtgagaatgatgcagcctgagagactccactggccattacttcctgtgaacatgtgtgataagacaaaattacaactaatttagttattgatgtaattggcttttatttttgatttatgatttggggcagctctccctctacagatgcttcagcatcccaagtagctgggactatattgcgggatctggccagcagcttgcaatgcaacagggctctttctttgttcccaggcagatcggcaggttgagaaataaaagacacacacaagatagtgaaaactgggtccagaggggtcactgccttctggtcctgcgatgctaccaatgcactggatataccagcatttattattaagtttagtgagagtgttggtaggttagtgagggatttaaggtcatttgtaagctgtccacaagggtcgcattccattcccagagctatggacatctgcttttctgggataggaatcttggttatgtgaaacctccctgactgcatgtccattcataggctctctgcaggcggaagcacatcacatgctgttggctcattctggcagcccaacctggcatttgtctttacacaatcctgtatgcaattttgtatttacaataatcaggagcatttcatcttttattccatagcaatagtttcagggggtctccctacatctcccccttttctctgatttcaatgaaccatagcaatcataggttggcactgatcacgattggattgaagaatattttttccaattttacacacgaacagtaaaccaatagcacaaattatacacagaacaaaattaacgatagtggatcctcccaaagattttacctattgaaaggggttgagattagataacccctcagagatactgtctaaaacttcagcactaggtaaagcagataagtgtgcttgagaggcttcaaaaatctgttctttcagcttgtttatgtctaaacttaaattatcttcacttccttgtaaatggcattttactgattcccaattgtgaaaagactctttatattggaacggagttatacaaaaatcagaagtattccaatcacgttgcatttgtaatctgtgttctaaactcataattctatctcccatccatataacagaagcacatcacgcgctgtaggctcattctggcagcccaacctggcattgtctttacacaatcctgcatgcaattttgtatttacaataatcaggagcatttcatcttttattctgtagcaatagtttcagggggtctccctacaggactacaggtgcgcgccaccatgccctgctaatttttgtatttttagtagagacagggtttcaccatattgaccaggctgatctcaaactcctgaccttgtgatctgcctgccttgtcctcccaaaatgctgggattacagatgtgagccacagcgcccagcccataaatcacacatttctttgagtttttgtaattccagcccaagagaaaccatttgatatttgaagaatggctgcacaccaataaaaacatctgtagattgcaccacacgagggagactaccagtatgactatcaggaggaaaatatcaagagtttggaatatgcaccttaggcaagatgcaaaccaactgcaataggatagatcaaggaagaagccagaagagtctagtcattttaaccaggcagcacatttcatgatttttacagctgagtctctataaaacccgatgtatttatccatgtgcaacaagaagggtgagaaactgcacaggctcccccctgttcagctgatagagagcaattctattatctagcattgcatgtgtatgttaaattaaaacagggagtgagaataggcaagtatagaagtggaagcctaaaaaaatctccatacatttgaggaaaaagttgtgttacaggtgcagctaacgtcagcctttgggtggattaaaggatctctcggtatgtaaaaatgggtgggctgggtgtggtggctcacgcctgtaatcgcagcactttgggaggctgaggcgtgcggataacctgaggtcggagttcaagaccagcctgaccaacatggagaaaccctgtctctactgaaaatacaaaattagctgggcgtggtggtgcatgcctgtaatcccagctacttgggaggctgaagcaggagaagcacttgaacccaggaggcagaggttgccgtgagccaggattgtgccgttgcactccagcatgggcaacaagagcgaaactccatcttataaaaaaaaaaaaaagtatggttgacatgatatacctgacactgttaacttactctcagaagctacttcttgtgaaatcctaagtacagcattattctgggaagcaaaggagacaggcataagcaaggacaaattaagagaggtaagagtctcatcatgattgatagtcttgttctgacatcttgagaaaagctgtccacagtgtaaagtcatcaacttgtcgtggtttgcagtttgagtgtctctaagttatggtgttgaacatgtggtgagctcttagtggcccccacctcagacacgagggttttcccatgaaatttacattgagttgtccacctccaccttatatggcttcaggaacagagccactcttgttcttaatgatttcattggagaaaattgaattggaagaactaaaagaattcagggtccagtccagtctaccagtggattataaatactcaaagataatgaacagtggttcaatctggtaacaggtgtactacagtttttcttttcaacatagtttttctctctataggagtctctatttttaccaaagataattccagtaggatgaatttgtttgcaaatttggttgagtctcaccgaacttgcccagattttttacctaagtgcggcaagagtagcaatggactgtagaggccatttttaaactttgctttgctagaagtttttaataagaatctcagattaaacttccaaaaacctcttgagactaggaagccaaaccaaggcccacttcagactttgcctgcattccctatgggtttattctatgtatattctcaaatataacatcccagtcaaagccttgataatataatcaatgttttcaaatgtgtcctgttataaagagagcagattcttactgaacttgtgcaaatagctttattaccataaacatatgaatactcatgaatagattcccaattctggggcactcagatagagagcaaaaggaaatgtttcaatttttgtttacaaaagtatactttaccaattgctcaagaaaaaatgttcataaatctggagaatgaaacattccaagaatcagcacattttcaaatagaaaattatgaaatcattatccttttgattatttagtccaataacattgagtatttttcttctttgtcttgaatttcatgaaggtatcagcctgttcattaaaattttgaaagttcttagtccagtggtatgatcttgaagttatcaggagcttgtattcaagagtccttgtaagagacctttccataaatctccttgaagaaaaagcaattttggactgtaggtgattgtaagtagtttgaggaagaatcaaagcaactgtctgggaatgacagagatttaaactgactatggttaaaaatctaatgagaatttattatggtaaagacacagctcacatagaaatctagttacttctgtggcatatgacactatgataacatatttgattttcagaaatttcatataatttttagaatactcattaaaaaaatttttttttcagatggagtctcactctgtcacccagactggagtgcagtggtgccatctgagttcactgcaagctccgcctccgcggttcatgccattctcctgcctcagcctcctgagtagctgggactacaggtgcctgccaccacacccggctaattttgtttttgcatttttagtagagatggggtttcaccgtgttaaccaggatggtctcgatctcctgacctcgtgatctacccacctcggcctcccaaactcctgggattgcaggcgtgagccatcgcgctcagcctagaatactcatattattaacattcccataaatattatttagagaaggtttagcatcacttatcccttatttgaaaatgctttctataaatttaatatataaaataaggtggcttttccgttcagcttctgtttctcaagaggattactgagttcttggtgtagcccattcataaatagggccaaaaatgtatagtcttatgtatgttgaaaaaggtccttaggtaattccagtacttttagctgaaaatcattgatttagttttaagttctacctattgcaacaggagttctccatccttgttacgtgttagtagtgtcagggaagacttaaaaattaccagtgcctgggtccctctccagacctttgaactggaactaatgggtggggcttgagcatccacttttagaaatgttttccagtgattccaatgtgtagctctatttcccatcagatttctctgatttcttgtggcattcaattttttctattttggtatcatgattattttcaggtctcatttcctgtcttaggctttatgtctcctggggtagggaccttgccttcttcatttctgtatgttttttgaacacatgaactgatcatcaggaaaagatctcaaccacacataggttgtgttctgagtctcaggttcacatgttaatcctaaagtctttgttctccacgaggtcacatgttgcttgtgatgaagggtgtggttaagtctgcagtgcagatggttgaagggatttcactctgtttttagacatagcattggaactaagaattttatgtctatatgggtgaaggggcagggatgtgtaggaagacagttctaattaggatggaggatttatactaggaagtagaggtaaaggaagtgagaagccttagtaaatagaagaaatgtgaacttatcaaataggctagagtagacccctgcagattcttgattaaatcaattaaccagattttagaaaggtaatgaggcaatcatatgcaaggaagatttcaaagtctggagacaagaagtcaagcaatactttgagaagtggttgagctttatgggaatggagagaattacactattgagagatgttaaaaataatgaagagggtttcaccatgtgaaattgtgtttctcatttgaatctgagaaacaaatgagcagaggctggagataattatgtctaaaagacagtggggtacagggagcataaaggccagggagaaagggaactgcaggaattagtgctgagaagcaggagtttagtggaggaaggaggagatgcagtcccagatacaggcaaataagtcttttccctctcccaagcatggcagtcagctctgcaggaaccaggataagagaaaaggccatcatacctgccagtcttcctgaaatacagaaatgacatcacagctgctatgttggattaaggagaggaagaagtcctattcttgtagaagctgtcatggaaagaaaagtaaagaaggaatgaaggtgatgttattttacatgggggagcatcaggaacaagcatgtaacatgaggtactctataattgtttcttcaaggaccacattatttctcttggaatattgatgggagatgattatattcttgcagttttttttccctctcaccatgtgtctcggttggtgatcagtcctctgtcaattctctactgcactcagatattttggaaggctttcagatgtgagaaaggctgattgctattttctatgtcattagaacttgccacattttcaccttttcatggttgcatctttttctcggtgtttctgttgtggcagtcatgaatgagactctgtcaggtctccatggcagggacctgattggcagaaggcccaggtcagtgcatttcaaattcaccacctcttgtgcacagaaagcttctttcctacaggctcccagcaagggtgtgaaagcaagcctagttctccgaggctctctttaactctaatgggtgactggttggaggattcctcatcagccttgcaaaaactcttagaactgcattggtacctaaaacttctttctctttgtttttcataggaatcagctctgcatagtggtctgtgggttctcccatactaccttcatgcctgccccacattccctcacagatgtcttccctgataaattatcttgtatgtctaatcccatcttggatgcatctcagttggtaaatactaacataccaggcttgattctttgcccttagctttttttctttctctcccacaagcagtcagtaaccatgtcctagtgttttatgtgttacctctttttccatatatatatatatggaaaaaggtagatactgttgaggggcacttgctatgtgccaggccctgtgctaaatacttccctgtatctcatttaatccacacaataaccctgtcaggtagacattatttccattttggcaatgaaaagacagaagcttagcgtggtgtaaaaactttcctggtgtcatatggctagtgacagggggatctgagatttcattctaggactatttgacctcaaggttgatgatgatgatagtaatatagtagctgacattggttcctctgtgtgtggcatcttgtttcattgactgcattaaatctttaaaagaatggtatgaagaaagcactgtcattgcaatattcaggtaaggaatcagaggttcagagaagttgagtcttgtgcaagaaatttataactgtaaactcttacattaaaaaagaagaaagatctcagatcaacaacctactttaatacttcaggatatgaaagaagaacaaactaaacccaagcacagtgaatgagggaaataataaggattagagtggacataaataaaatggagaacggaaacagaatagaggaaattactgaaaccaaaagttgattcttcaaaataaaatcaacaaaattgacaaccattaactagattgactaagaaaaaaagagaaaagtttaaaattcctaaaatcagaaatgaaaatggactctgagcatggtgggtcatgttttaatcctagcactttgggaggtcacagcagaaggatttcttgagaccaggtgtttggaccagcataggtaacctggggagacgctgtgtgtacaaaaaaataaaaaaccaattagctgggcatgttgacatgcacctgtagtcctagcatcttgagaggctgaagaaggagaattgcttgagcccaggaggttgaggctgcagtgagccataatcacacaactgtattccatcctgggctggcctacagagtgacagcctgtctctctcttttcaacaaaaaaaaaaaaaagaaagaaagaaagaaagaaagaaaaatgaagcgattactaccaattctaataaaataatgattatgaaagtactataaataattgtatgccaataaattggataacctagatgaaatagacaaactcctagaaacacacaaaaatatgaataaaactataatcactaataagattgaatcaataaaagcatttgatgaaattccatattttttcataagaaaaacattgtaagaatggaaggaaaccacttcaacataaaggcaatatgtgaaaaacccaatggtaacatcatacttaacggagaaagactgaaagctttccctgtatgagcaggaataagacaaggatgcccacttttgacacttttattcaacatagtgttgaaaggtctagtcagaaaaattaggcaagaatttaaaaaaagacattcaaattggaaggaaggagtaaaattatttctgtttatagataacttgaacttatatgtagaaaatcctaaaggtggaacaaacctattagaattaataaataaattcagtaacgttgcacaatagaaaatcagcattcaaacgtcagttgtatttcaatacactaaccatgaacagtctgaagggaaattaggaaaaaaatttcaatttatattaacatcaaaaagaataaaatatttaggaataagtttaaccaaagaggtgaaatgattatacctgaaatctacaaaatatggctgaaagaaatgaaagatgacatcaataaattgaaggacattttgttttcatgaattggaagactcaatattgttaggaggacagtgctacccaaagtgagctgcggattcaatacaattcctatcaatcagaatctcagtgacatttttgcagaaaaacaaaaatctgtcctaaaatttatattgcatctcatgactaaatagacacagagctttgaggaggaagaatgaagctggaggactcacactttctgatttcagcatttactacaaagccccagtaatcaatacagtgtggtactggcataaaggaggacatagaaattaatgaagtataatagcccagaaagaaattcttgcatatatggccaaatgattttcatcgagtgtgccaagatcattcaatggggaagggacagtgttctcaccaaatgatattgggaaagctggatattcaagggcaagaaaactagaacctttacataacaccatgtacaaaaatcaacccataatagatcaaagatctaaatgtaagagcaaaaactgtacaactcttagaagaaaagcttcatgatgctggatttcacaatgatttcctggttgtaacaacaaaagcataggcaacaaataaaacggataaatcggacttcataaaaatcaaaaccttttacatatcgaagaacattatcaagaaagtaaaaaggcaacccatgaaatgataaaaatatttgcaaattatatgtgtgataagaaattaatttccagaatacatgaaaagctacaagtcaacaacagcaaacatccgaaaacccaattaaaaaatgaacaaaagattaaaatggagttttctccaaggaggttacacaaatatccagtaagcccatgcaaagttcctcagcatcatgaatacttagagatgtgcaaatcaaaaccacaatgttacaccacctcacacactttaggatggctttgataaacaacaacaatgacagcaacacaaaacaacaggtgttttcaagcagatggaaaaattggagctctagtgcattgctgatgggaatgggaaatgttatagccactgtaaaaattggtgtgctgtttctcaaaaaattaaacaataaattaccgtttgatccagcaattccacttctggacatactccccatagaattgaaagaaatttgaacaaatatttgtgcactgatgttcagagaagcattactcacactagcgaaaaaatggaaacaaccaaaaagtccattgaaagataagtgggtaggcaaatgaggtgtgtctatacgttgaaatgttattcaaccttaacaaggaataaaattccaatacatcgtgcaaaatggatgaaccttgaagatattatgctaactgaaataagccagacacaaaaggataattattatataattccatttataaaagatagttagaatagccagttacatagagacagaaattagaatggtgggtgctaagggttcgagggagaaggagtgagagttactgtttattgggtacagaggtttaatatggtaagaggaaaaagttctggaaatggatagtgtgatggttacacaacactaaattgcacacttagaaatagctaatggtaagccttatattagatatatataaagtgtctggtagtcttaccctctctataattacacactttttggcactgcccttttcctgccatgcagagctccaggggtgaatctccctatttctctagctctgcatcagtcacagtcctccatgctgtgtcccacgtactgtgcccacagcttcatacaaccgctgacttcagagccaggaccaggcttaggagtctgccctgaggctccttctcttctcatttccctgcagcctggcccgggggaggcttggcttcaactggcagctccatttagcgaaattcaggacagtccacaaggggtctttctccacacatgctggtcccaccccaggtggagtcaaacagggccagtcaccagaggagcccagagcagagcaggaagcagagtctgagctgctcctccctcacccaaggggcttcctcctctcatttgggggaaaagtgtgagcttgtttcaaagcctcagatgttccttgtagctcatggaataggtacaagaaaaaaaagacgtggcagaaggggatgtgttagtgacatccagaagcaacttgatcttgaggacactccttcttgtccctctgtgaagcctcttctaccacatagggctcagggctgataatgacccctccctacctttctcaggcgagacacaaggtcagccatgagaaaacagaaaaacaaggagaagagagtttgtagagacaaattgggagggttcaggaggagaatttgggatttgcttttgcccatgggacacaggctgggaataaaaatgttttcctgactcttctctgaaagccagatagactccacctaaaaccctactgccaaggatgctgggatccacttaccagagactttgactgtcaacgatgtggagctttcctcgccagtggctgagttacgaacagagcaaacatagagcccgctatgctttgtagtaatttgggggataaacagattttgtcctgattgctgaaacttcccattaattgtccaagaatactgtgccggtgggttagagttcgcgaagcaagacaagtagaggttatctcctgaacggtaattggtgtatgaagggtgaattctggggaggtctggaccatctggagcaaagagaataaagccacaggtgatgccatctgagggaaggggatgctcctggtctcttaaagggacacagtgaccctctgagacaagacacatcctcaagtcccagcaaaaccccctctatgttcactgagccgaaccctgaagtattcacctgtttctcccaccacaagatgtgggccccaagtctcccacgacaagaccgtccactccccttatattcttggttaaggctgtgcctacccaggttttcccagggcagggagtcatggccagcttggatgtccagaagtaaagttgtctatacttggaccggagagagactgagaggcctggcccctggtcatttggatttaagctggtggcctggcccacagaggaacaaaagatacagaggacattcagggtgactgggtcactgtggatgccaccatatcggtcccgtatttcacattcatagggtcctgtttcatttctcgtgacactgggtagaatgaggatcctgttttcaatgggtcgctttaccctgggactgaccgggaggctctgaccatttagccaccaaatgtaggtgtagctctcactcttaggttcacaggtgaaggctaatacatccttattctccctggggtttaagttgttgatggtgatttagggcttgggcagcttcgctgtgtggataacagagagaagattgtcctgtgtggcacttttgattcctccacaggcatccttcaatcagagttaccatctcccacctctcagcccacctgagtccttgaaagccaataactggtgtgtgtgtcacaagacagatgcatgatgatctaagggctcaaagactgtgaggccgcctgctctgtcttaggaaagcacagactttctgaagtgtcaattgagcagcagtgttgggtcatggacagacatgtcagtgggagtcacagccccagtacccctcccagtctctccctaatcagttgactggctggctcaccttgggttccttacctggaatgtgcaactgctgggccccttccaaattccatcctactttgcccccctagatgtgatttctctgcagcttccatttccaaggacattctagagatcagtaataatgggacttcccattgtcctgaaaccctgaagatactgagcagcctggcctgggactggatgtttcagcagaaataacacaggggagaccagagtcaagcctggaggtcagttcagtcatcaggcagtggaggcacaaggtggggcagctttttgcaggtgtttcatgatgacttacttgaaccagtgacctctaaagatagaacagagtgcaaggaatgatctagaaagagtgaaggggataggcaagagctggtggctttggagcagaagcatgttccctgtcttgggttctttaagtttcctctccttctgcagagggcaggtgaggaccatgtggatctttccagaaatacatgcggacatttgcaaaagcagaactgactggtggaaagggtgggaatgaactgctggaaatctggtcgtcatggaccatgtgtgtttgatggatatgagacaaatttggagagaagtttttcaaatattttctttcattgaacaatctactctgtgattccctgggttcgactactctagggacctcatgtaagtggattccagagtgaatatgagaagagactgctggttgccaggagctgggagtggggagaatcagaagttgttcatgggtgtgcagtttcagttatgcaaggtagggagtttctagagatctgctgtagagcttgatgcctatagttcacacagattgagtatttcttatgcataagacttaagacaaaaagtgtttcggatttctgacattttttgattctgaaatatttgtcatatacttactggtttagcatcccaaatctgaaagattcaaaatctaaaatgctccagtgagcatttcttttcagcatcagattagtaggcaaaagtgggaggtgataagccaaagatattcttgcccttttttttctctcaccacgtttctggcttggtgattagttttcggtcaattccatactggccatgctgcactcgtttattttttaaggctttgggatgtgagaaaggctgattgctattttctgtgtcatcagaactttccaccttttcatggttgcatctttttcacagtgtttctgttgtggcagtcattaataagagcctgtcaggtcagatttaggacggagttttctaattctgccaaaaatgttactgtgattctgggaggggttgcattgaatctgcaactcactttgggtagtattgtctttctaacaatattgagtcttccaatccatgaaaatgaaatgtctttccatatattgatatcgtctttaatttctttcagcaatgttttgtagttttcaaggtataatcatttgacctttttggttaaacttattccaaaatattttattccttttgatgttaatgtgaattgaatttctttccttaatttcctttcagattgttcattgttagtgtatagtctaaagaatgatctagaaagagtgaggggacaggcaaaagctggtggttttggagcagaaacatattccctgtcctggggttttgattttccctctccctttgcagagggcaggtggctcttccctgatagctagatagacttcactggaaaacatattgccaatgtttcagggatccacttaccagggactatggtcctcttgattatgagatttgttccagcagtggctgagttatggatgaaacagacatagagccctctatatgttttagtgatttgagggataaagaacacttgtgctgattgctggaacttcccatcaatcagccaagaatgctctgccagtgggtgagtgtctgtgaggcaggagagcttggggacttcccttgtatggtaataggtgtgaggaagaaatggtgggggcatccaggccatctggagcaaagagcataaagtcacaggcactattgtcagagggaagggaaaatcctggtctgtggaagggccacagtgaccctgtgagccaagccgcaacactgaactcccagccaaatccccgctgtgttcactgatctggagcctgagacattcacctgtttctcccatcacaagctgtggaccctgagtctcctatgacaggaggagcctcttttctcctattgtggatcaagcctaggcctattctggtttgcctggggcagaaagtcatggccagctttgatgcctaggggtaaaggtctctgtacttggacctgagagggactgagaggcctggcctctggccatgtgtatttgggatggcagtctggcccacagaggaacagaagatactcacggaggagattcagggtgactgggtcactgcggctggcactccctgagttccgtatttcacattcatagggtcctgcagtatactttgtgacaccaaatagaaagagggtcctgttggtttcggacagctgaaacctatgagtcatagggaggctctgaccattcatccaccactggtagcttgtgtccggagtctcaggatcacaggttaagatcacagtttccatggcctccctggggtttaagttgctgctggagatggagggcttgggagtctccactgtgcagaaaacagagagaagattgccctgtgtggcacctttgattcctccaaaggcatttttcaatcagagttggcatttcccacctctcagcccacccaagtccttaaaagcccatggcaggtgtgtgtgttacaagacagatgcatggcaatctgagggctcagtgattgtgaggctgcctgctttatgtgggagaagcacagactttctcaggtgtgtattgagcagcagcattgggtcatggaaagacacaggaccagcagtcacagcccctggtgcctctctgagtccctccatctcgaagtgcctgcctggcccaccttgtggtcctcacttggagcatgcagtgctggaatcttcttagtttcagtcttactttgccccctgaggtatgttttctctgcagcttcccttgccaaggacatccaagagatgaatgatggaacttcccattgtctttaaaccctttgggtactggaaagcctggcctgggactgggtacttcagcataaataacacaggggagaccagagtcaagcctggaggtcagttcagtcatcaggcagtggagccacaaggtggggcagttttcccaggtgtctcatagtgagtgacttgagccagtgacctctaaagatagagcagagtccaaggaatgacctacaaagagtgaaggggacaggcaagagctgatagcttctgaacaagaccatgtgccctgttctgggtccacaatgctcccttccccctgtagagggcaggtgaggacgatgtggacctttctagaaatacatgtggatgtttgcaaatgcgaaactgactggtggaaagggtgaacatgaactgatgatggaagtctggccctcatggaccatatgtgtttggtggatattagaccaatatttgggaagaagtcttgcagatactttcattagatattctactctgtttctgagtttaactaccctatgtacctcatatcagtggattccagagtgaatcagagagtagaatagtagtttccaggagctgggatcaggggaatagggcgttgttctgtgggtgtgcggttccagttatgcaggataaggaggttctagagatctcctgtacagcctcgtgcctatagttcattcagataaagtgctccttatgcagaaagcttaaaacaaagtgttttggatttctaatttttttattttggaatatttgccgtatatgtactggtttagcatcccaaatctgaaaaatttaaaatccacaatgcgccagtgagcacttctttttagcatcacatcagtggtcagaagggttgagttttgagcatttcagattgtggatttctggatttgggatgctcaattcgtaatactgtaattttcccataaaaagttgtcaggagtttagacctcatgttatgttctgactctagtaacaaaaaaaatttggaggaaatattaaaatgttttcataagtggaaatttttactgatgatccaaacatctaagatcaattgctggtagtagtatttctcctgagaccaaaataaggtttaggtgtgccgtgaattccagcaggatcacattatgctcaaagaaagatgccaaaggtgattggaaattagcagctccttaagtagagagagtcccgttaaaaggacagaactggtcagtgcatcaattacataaagggaggaaggatgccaaattaaaagaagtgatgtgtgttatgttagtaaatatagaaagaactccctgcttctaatttctgtgcagagttaggaaaaatggggaggaccccaaaacaggtatgtgaaatgctttcttcattttctcttaagctcaggaaacaccactagagtttaagtttgtgtgaaataggaagattctaagtgagatgccaatggctcatgtgtctccccacaagaagaactccaacttatgaaaacggcatcatcatgaggaaacacttgtgtgtggcacaggcagtaaaaccatcagatagcacccacctggtcacctccaactggtcctcaaaaccaccagtattcctattacgtgtacgttacagcatttgtatttgtcccacaactacataatttaaaaattgctactgtcaaaacaaaatattaaatatgaagttgaatcagttgttccactttttcttccccactcttcttgaactttcctgtttcagttttggaaatttctattgacacgtcctcaagctagggattccttagcttttttacttagtgttggaaccgagtgacaaattccaagcttgttatatgcctgaccggaagccagaagtctctaggaagtgactggagaatgtgagctctatagcaggttgaggatggagtcacgagtgaaatgggtgatatgagcccatgggcttgggggactgcaggcctgtccagcctctgacaccctggtgagtcattgcagagattacaacagtgacagcaaactagcatggctgactccatctggcatctagtctcaggctggctgtcctcacttattcctgggcataggccaggctaaccttgggaggaatttagtttatggtttaattttgaagcaagaatgataatagttcctccataaaactaacacccttactttgcccagggacggcctttgtcaaactagtgaaagaccatgagattaagattataggagggaaccgaattctgctaaattgttgtcacagtttctataatccctgactgctccaatgtcatttggctggagttgacaaaatttgtaactaattgatcctatagataacatcactattatagaagttgagattggtcttttgagatgtttctcattcttttgcattctggcaactggctgacctcatccatacctatgattaatggctcagccagtcatgtggtccctacctagaggcggattccagcacaaactgatcatttccctccgcccgcatgattccatcaccaaacaatcagcagtactcatttttcagtcctgtgcccctgaaactatccttgaaaatctctaagccctgatccactggggaggctgatttgagtaataataaacctctgtcctcctgtttggcagacttggagtcattaaaatctttctttactacaaatcaccatttcaataatttttttgtgtgtgtgtgcaggaggccagaagaacttgtctgacaatgataagagtggttggagggacttcctatccctgtcccatggtcttgtccacaggtcagcctcacaaaggggaagagcccttgatgggaatacagtggaagctcattctcttagtgacctggggacattggctcgagatgaagcctggcaggagtggcaactccaggtgatttctgcacctttcctatttcctgggaggttggctaggccacagtgttagaaggaagggaacagaacagccagcctagttagagggagtgtctggggaaggcctaggtgtgagggaagaagctgtgcaggacagggcttgccagtcagaatgaagtgggaggaagatgagggacacagagaagcagagagaggcagagacaccatggcagtgagcagtgagggctacactgacgtcagagaccccagggaccagctgcccccagttccacagtccagaaccaaggagccctgagaaccctctggtggccaaagagcttcagagttacatgaggtggggttgctttaggggcaagaggtagtggggggatgaaacatgggtgtcagcttctgaaggacaagggacaggtgtggctaggacctcctaggattctgcatccaacatccagtctctaaagaggttttggatcattcatttcttcattccattccttcatttgttatgtgagagctcctgagtgtgtgtgtctctcactgggcctgtgctgatgcagggtgtgagtggggaaagaaaacaaggtcctctccttgatcctctcatgacagtgacatggacactttgggaaacacagggtttcaggttcagtgatgggggttaagatctgagagggaggcctgctcatgttttttgcactgattctgacagttgaggcaggtgatttagttctggagtacagattaatcagctgaccatttgctctcactcctctgaggtttggatgcctaagaagagaggatttgagccaataaatgacatggggtccttgggacccagtaagccctcacttctggtggaggagaggaagggcctgtggctgcaggcagacctcatgtgaccctgatctcccctttgtgttggtgtgactctggttcagtgactgtgccttcctgtgcctcagttttctctcaatcaaataagctaaatggcaaatggactgtggcttttcatgctatctgtgaataaatgttaaagtattcacagtcacttgatctaatgcttggcacagtggaggtttcacacaaacagcatttattattaatttgcttccatgagaaagcaccgttacatcagatccctgtggacaagctgctaccaggtacatcttctgtcttctgtttctgcttctggggacattagacttcctatggactctcctaagcctcctaaggcagttggctgatggtcttcaaagattgtctttctgtcctctccactctgcctctcctgttttgacctctgtcctctacaccattgcccagatgaggctctgagggctgagccctagctggtgaacagctccaggagacacagtcctcagacagctggtaaatccttggtcccagtaagccctgcccatgaagccacaacccagccctggcacaggctcctaagctttatctggagcaaggatttagggacagggtttggaggttgaggtttctagggctgagcttctctgagagtatctcaggggacccctcaggccaagccctgctcagttctccagggtctttctcagggtcaaatttatgaagagggcatgaggtgcttggctgagactgatctcctcctgctgagtccccccatcagactgtccttcctctgcagcgagtgtctgcagggtctggatgcgggaaaggaattctgatctgttgaaatgtgtctcctctgtgtgtgtcctgcactaaatgcccaaaccccagcatgggacataatgcagagagggacacaggcacagtctaggcctgacaatcctgtgtgtgtgaagtagaaatgacccctgtcccccaacacccagggatcatgtggaatcacttacggtataaggtgaaggtgaaatatccagttactcctctagtcccatcacctcgctttatgatgtgtaaggtgtaggatcctgcgtcctcccgggtgacattctggatcagcagggatgcattggaatatgctgtttctcgtccactatatgcaggcccatatataattatttgaccgtctactacatatgatgtaatgtaatggtagaggtccctgatttgccctttgtaccagatgtagccagtaagattctggggcaaattgtggacaagtagaagaacatccttcccctcggaaacttttggtggctgggcttcaatcgtgacttgggcagtggtgggcaggttccagaagtttaaaagtgatgctaggaggtggagagagcatcagacaatattgagacctatgtattggggtgaaaagatggggccctgggtcctgaggaggtctcttcaatcctcagccttgaagacacacacacacacacacacacacacacacacacacacacacacacacaaaaggggcatgtgtgtttgtatgtgtgtatgtgtgtgtgtactactgtcctactaggtcaaggtcagcagcatgacccccattccttcaccacttgtgaccttggcatttttctgtttggaatcctcttccccaggggtccgcatgaccccatcaggtcctgctcacatcagggtatcctaagacttctttcctgacacctccttcagagaccctgggtcttccctttctgacctttccctgctctgctccctaaagggttcttgttaacagctgacctcacattctagatctctttgtatgtctgtcttcctccccatgacagcatgagctcagtgaggacagggacttttgtgatcttggttgcaccccagtgcctggaacaggctgcagactcctgtagatgtgagacttctcagggccctccacacccttggtgtttttttttttctcccccaattgttgaggttttttgctgaggacagtgtttcacgtcctgcttatatttttatttgaagtgtcatctgatatagttattattatcatttttcaaaatgtggcccctgatgattaatcaggaaaacagaacacttaagattttcctacctcttaccaattccagttcaatgtgattttcctgttttgacccctgtccctctctggtatattttcccctatccaggctccaacagagccttctttccttttatttctttcttctctcttttttttttttttttttttttttttttttttttttgagacggagtctcgtactgtcgcccaggctggtatgcagtggcgctatctcggcacgctgcaacttctgcctcctgggttcacgtgattctcctgccacagcctcctgagtagctggaattacaggaacacacgacaatacctggttaattttttgtatttttagtagagacagggctacactgtgttggccagactgaccttgaactcctgatctcgtgatccacccacctcagcctccctaagtgctggcttctttcattttttagaaccccatcctctccaggagaccccatccagtcactcttcttcctcctcctgtcctctcccaggaagttctctcctcacctgtgaccaggagccccttccatttgatgtgctctgtgcagggaggggctgagaggggccccatggtctctgctgcctgtgtgttctcctctgtggagatgagcctaggatccagaaacttcctgagcacggctgtcagctgtgctgtccttcctccttctgcactgagcctcttcctggggcagcagcaattcccaggctcatgggtggggtcaggcccaggacacctctctgtcccctcctctctcagtcctgcctccttgtccctccttctgttttccttttgtctgtgtttcaggtccctggggattgtggaggcctctgcctttttcagcagtgattctttcaccaaacctcaacacacactttgtgcagacacacacacacacacacacacacacacacacaaaagagacacacaccgacccacacagtgacacacataccctgcaggttgggcaaggacagtcctgggcctcagcctcctgctgtccccatggccctgggtcggggtacacattcacgacctttgccctctttcatccccatctggctctccccttcagtgcaggaggctggagctgcaccaggtccctgtcacagtgatgtcccattgtgctgtgggtgagctgtgtgttgcctggtgagagggacccttcctttctctaatcgtgtctagcttggctgcagcttccaagaatggacattcaggacctgggtgtcctagaggaaactgtcctttctggaggtgtgcagggtgaatctctcatgcctcttggtaggagaggcctgtgctggttgctcagtgggggctgtgagtcccgtagtcaaggggaagttctcggtcactctctgactccctggggtttggctgctgagctggtgctcagggtttctcatgttcttcctgaccatctttgatgtcctctcttctctgcccagctgattgtcctgtggtcaccacaccttccccgtggtggtgcaggaggaagtggggagttacccaggaaccccgcgggacatggcttgttgagacgcaggagggggaacctgggacagagcaggggttcagagctggagagattcatcccgacttactccgtggccatgatgggctcagccctccatgtgctgacatacccaggggtctgtcctgagggttttgacctggccaagctgctgtgtgtagaggaggaacaggcagtggccagagatcctgtctggagggacattgctcacacctgagagggcaggtgggggtgagttgtgttctgggagcaaagagcaataacacccctcatctccccgcaaggacacaagagaggtctgtcttcccaagggacagctgggggcaggtggccccatcccggatggtacctgtgtgtgaccatcacatgcgctctgagccccgcgcggtgcagcgggcagggaggtcacagggtgcctggctgattcccggggaggctgtgggccctcaggcagccgctgttctgtgtcagctctaggcttggcctgggatgccccagagaacaggacagatggagcaggggtgggcatttagggagcagtgacagaaagagttgatgaggatggagggaggtcaggaggggaaagctcccagtgtagtgtcgcgtgcaccagcgctgccctgggagatgcctttagctgggcccagggaaggagcaggtgtgtggggcaggagctccctgcagagggagtggtgttaggttggcggcagccaaggcagggaggagctgacagagtccgtgtggggagcatggagggcgctgaggacttaggcccaagtgaccctggtgagggtggacactgctgggctgtgggttccgctgagggaggttggcatcccctgggaaggctccaggctgggagggactctgtcgccctcttgtggacagggagggaagtgtgaacggcagcaatcccaggccaggctgcatgttttattccatgtggatctgcacacttcacacgaggtcacacatatgttatgttacagctccttcaccttccagccccgtgagtcccagtctgtgtgactctacgttcactgttctccctctttcacaatcagatgtccgaaacgcagatttttgtcaccttctgtgagtttgtgtttgtgtgcagtaggcggcactgtgtataccctgggggcagtgatgtctggggctgagcactggacatgggcttgggagcagaagagggagcagcagggtgggaagatcaatgttgaggggcagggacaagtcattttcattttctcactcccagggaccagaacccaggattctgactccagggcacagtatcacacccttctggtgtccctggatgtcgtgatgctcatagcgtcatgttgccttggcattcattttttaaggtgtaagtttatttgcctcaaatcagaggcagggcttggtcaccatggcagttttcaatactgtatctggttcaggtggctccagttggtgtccagagataaaatcttagaggcatctctcctgcttggtgtgctgggctcacctctctccagctgctttctttaaactgataattctgacattcgccctcacatttaaagtgaccacctctcagtcacagcctgagctcctggtcccagtgtttgctgcttgctttgaacacatccattaaagctccctgctggaaacctgtcagataacaccctggacttaataaagccattggctcaccggtctctttcctccctgcctgtgctcactgacctctgtggtctccaggtgtgctgagtgctccctagtgtgtgtaagtattaaaaatacttacattttcacattgtggttgtatcattgtagcctcacatgccatccagggcctgacattgaggctgccctatgggacctgtgctggttgagcccctgctggagctcttgttttggggcctctggttctgctggggacaggagcttccaactaacttgattgaaaatctgatgcgtttcattgaaacactgggtcagatgatgtattcatgggcttcagctgccataacaaacaccttagcctgggtgaattaaataatagaaatctgtttttcacagttctgtgaataatatgctattttaaccactttaaaatccacaatcaagtgaaattaaccacatacacagtgttaaattaccatcaccagtatttttcctagaaaatttttatcattttaaactgaagctttgtatcttttaaacaataactccctgtatgttccaccctagactttgatcatctctactctgtctctatgaatttgcctattcttggtgtttcacataaatggaattatacaattatgttattttgtttctgacacatttcagttagcataatgtttccaaagtccatgcatgttccagcgggtgtcagaccttcattcctctttatggcagattaacattctgttgtgtgtgtcaccatatttatttattcatgtgttgatgagcacttggattgttttcatattttatctcttgaataatgctgcaatcaacattcctatgcaagtgcctgtttgagtccctggatttaattccttgggtgtacacctaggaataaatgttgggccaaatgagaattctatgattagctttttgaggaaaagcaaaactctttctcctaggggctgtactttttatattctcaccagcaatgtatgaggattccaaattctacataatgctgctacttgttatttaacattttaaaagaatggtagccagtttcgtaggtgtgatgtggtgtctcattgcagctttgactttgtattttcctagtgactaatgatgttgagtatcctttcatgtccttcttgatgtggtttgcaaatattttctctcattctgtgtctattaattattttcttgataagtttctttgatgtacaaaaggctcacatcttgataaagcccaatttatctttttttcttgtttctcatgcttttgtatcatatctaagaatccattgcacatttgaggtcatcaatatttacctctatgtctattttaagatgtttttatggttataagtctgatatttaactcagtgattaattttttagagaattgtttgatatggtggaagctagagtaatctaaattcactgttttgcatgtggttatctagttgtttctgcactatcatttgaaaggagagttgttcatccattaaattgtcttgacaccctcttcaaagagtaattgaccataagtgtgagggtttatttctagactgtcaattctatcccatttttctttatgtccattcttttgccagcagcttctgttttaataattgtactcctttgtgagatttcaaataagaaagttcaagtcctacaatttattttggcaagattgttttggctattcaggtgtccatttttgaaagatggggaagctaatgtttcacaattgggaaagtcttttctgtcttcttcagggggaaatttgggagaacattttaagaaactttatctaagtaggtaaactctcaccactttatttgctgaagtgctatgttaaagtgtgcattgcctattgtggaagaattgtgagaccctggaagcacctgcccacgtggtgagagacagtaaattccatgatgaggggcagagaggacattgttttgtgatacaatgttgttgggggagttgtatacatctcaacttctttatgtctctatacagtgggtgtagggaccagccccacagggtcagtgggtttttctccccgtgtgcagagacgagaaattgtagaaataaagaaacaagacaaagagataaaagaaaagacaactgggcctgggggacaactaccaccaagatgcggagaccagtagtggccccgaatgccaggcttcgctgatatttattggatataagacaaaggggcaggataaggagtgtgagccatctccaatgataggtaaggccacatgtgtcacgtgtccactggagaaggggcccttccctgcctggcagccaaggcagagagagagaggagaaagagagagcttacaccattatttctgcttattagagacttttagtactttcactagtttgctactgctaactaaacagcagagccaggtgtacaggatggaacatgaaggcagactaggagtgtgaccactgaagcacagcatcacagggagacggtcaggcctccagataactgcgggtggacctgactcatgtcaggccctccacaagaggtggaggagtggagtcttctctaaactcccccaggaaaagggagactccctttcccggtctgctaagtagcgggtgtttttccttgacactgaggctaccactagaccacggtctgcttggcaatgggcatctttccagacgctggcgttaccgctagaccaaggagccctctagtggccctgtctgggcataacagaaggctcgcactcctgtcttctggtcacttctcactatgtctccccagctcctatctctgtatggcctggcttttcctaggttatgattatagaccaaggattattataatattggaataaagagcaattgctaccaactaatgattaatgatatttatatataatcatatctaagatctatatctggtataactattcttcttttacattttattatactggaacggctcgttccctcagtctcttgcctcggcacctgggtggcttgccgcccacaagtgggcatctccattggacacagtaggttttgaaatccttgtttatcctctggggtctgggtcttatcttacctgttagctgcagctgaaagaggtgtctgctaaggcaatgacacctgtggggagaagaagggttcagcagagtgaaagtagctgggactcagagaagccaggaaagtctgactcttagaaactatgggtcagcagatgtgtgtcctcaggggtaaatgggccatgccggtagccactgcagtggactggaagaaggtaagggctgctgggtatcccatgttctgtctcagctctgcagctgaagatttgggccctgggctggtacggccctgcagcaggggaagggtatacaggaatggctgcatatcgggaccaagtccatgtcatcttcttaggcattgttactgcagatggaggattctgttcagagacctggcctggacacatgggagggcccaccccattcttttaaaattattttaagagaacagtattagcaaatgtggtacatgtcttattctgctagaatcagtattactgtcatgttttaccatgtatctcttaggaaatggtgagagccatccacacaatgtggatttaaaggggactctactataatttcagctttcctactctttatagaaaccatcttctctgcaaacacacaggcaatatctctgtgttcatttctactgggaaccctgtatgcaagatggagagagccacatttccccctgagatgttatgtaaaatttgaggttgagatgacatatctgacactctgttgttaccctcagaagctactacatgtgaaattctaatgactgcattatcctaccaagttaaagaggcaggcatgagcaaggacatttaagaggggtgagagcctcatcatgatggggagtcttgttctgacatcttgggaagaaatgtccacagtgtgaagtcatcaacttgttgtcctggtttacagtttgagcatctgttgttatggtgtcgaaaatgttggcgagttctgagtggctcacgcttcaggtacaagggttttcccatgaaatttacattgagttgtccacctccagcttatagggcttctggaacagagtgggtcttgctctttgtgattccatgggagaaagtggaattggaggaactagtagaattcagggaactgtccagtctacaggtggataataaaaacacagaaacaatgaacagagctgcaatctcataaccggtgtactacagtttttattttccacataatttttctctctatgggcatctctagttttaccaatgataatttcagtagaataagtttgtttgcaaaataggttgagtttcttcaaacgtggtctgattgtttacataagtgcagcaagagtatcaatggaccatgtagggtctcttttaaaattttctttgctgtaagtttttataaggaatctcagattaaacatttacaaacctcttgcgaataggaagccaaagcaaggctgacttcagactttgcctacagttcatattggttcattctatctatattcttaaatataaaattccagtcaaagctttggtaatataaccaatgatttcaaatgtgtcgtgttaaaaagagagcagatttttactatacttgtgcaaatatgtgtattaccataaacatatcaatactcctgaatagttgcccaattctggggcagtcaggtagacagcaaaagtaaatgcttcaattattgttcccagaagtatagtttattgaactgctataagctatagatagattaaaagaaaacaattccataaatctagaaaacaaaccatttaaagaatcagcaaattttcaaataaaagtcataaaaacattatcctcattattatcaattgtttcaatgaaatcaatgtttttcctgcttggtaggctgagaattttatgaagatatcagcctgtttgttaaagttttggaagtttttgacagtccagtggtataatgtgaaagttatgagaaacttgtattaaagagttcttgtcagcatcgtttccataaatctccttgaaaaggaagcaattttggactgtagctgattggaaatgctttgaggaagaataaaaacaacatctgtgaatgacaaagattttaaatgactatggttaaaactctgatgagaattcattatgataacacagctcacataaaaagttagttatttctgtggtatatgacattaatggctgataacatatttaatttctaggaatctcatacaatttctggaacaatcatatcagtaacatatccataaatataacatagagaaggtttagcatcctttaccacttatgatttgaaaatgcttttcatataattttacaggtcaaataaagtggcttttccatgtagcttgtgtttctcaacaggattactgagttcttggtggaggtcattaatggatagggccaagaaagtataggcttatgtatgctgaaaaatttccctagataattccaatactcccagctaataatcatgaatttaggtgtcagttttcctattagaacagctgttctttatcctggttacacattagtgacatctgggaagacttaaaaattaccaatgcctgagtctcactttagaccattaaattggatcctatgggtggggcttgggcatccatttaaaaaaatgttttccagtgattccaatgtgtagctgtatttcccctcagatttctctgatttcttgtggcattcacttttttctattttggtattataattattttttgggtcttatcgtctatcttaggctttatgttccttggggtagaaaccttgccttcttcatttctgtatctttcatgaacatatgagttggtcatcaggaaaatgttttcaatcacatgtaggttgtgttctgagtctcaggtttacacattaatgctagagtcattgttctccaggaggtcagaggttgcttgtgatgaagggtatgggtaagcccataatgcagacggtagatgggagatcaccctgtttttagccatagcattggaactaagcattctatgtgtatatcagctggaggggaagggatgtgtagaaagacatatttaattagaatggaggaattatactaggaaatagagggaatggaagcaataaaaattagtaaagagaagaaatgtgaacttatcagataggcaagagtagatccctgaagatttttgaataggggagttaactagaatttaggaaggtaatgaggcagtcatacacaaggaagatttcaaagactggagataagtcaagcagtacctctagcagttgttgaagttgtgggaatggagagaatgacacaagtgagagatgttaaaaaaaatgatcaagagcgttttataaggtattgaatctgggaaacaaatgagcagaggctgaggataatcatttgtaggagacagtggggtacagggagcatgaagaacaggggagaagagacctgcaggaataagtgctgagaagcaggagtttagtgagaggaggaggaggtccagtcccaaatactggcaaagaagttctttccctctcccaagcatgacagtcagccctgcaggaaacagaacaaaaggaaaggccatcatacctgccagtcttcctgaaataaactacaccagggctgctagatcagagccacactggccagtacttcaatcatgatgctgacagtggctctacctgaaaggccaggacaacttccttgtactgaaatatctgtcatggaaagaaaagaagagaaggaataaaggtgatgttattttacagtgtggtaccttatgaaccatcactaagtatgaagttgtttctatttgtcccttcggggattacattaattttgtgggagggttgctggtagatgattagccaactatattcttgcagttttttaatctgtcaacatgtttctaggttagtgatcagtcttctgtcaatttcatcctgaccatgcggcactcagatatttttgaaggctttatgatgtgagaaaggctgactgctattttctgtgtcgttagaactttctaccctttcatggttgcatctttttctcagtgtgtcagttgtggtaggcatgaataagactctgtcaggtctccatggcagcttgtgtttctcaagaggattacagagttcttgatggaacacattaatgaataggactgagaaagtataggcttatgtatgttgaaaaatttccctaggtaattccagcactcccagctaataatcgattaattaataatcaattgacttgattgacagaaggcccaaatcagtgcctgccaaactgataacctactttacatagagtcctcactttcctgaagctcccagcagggatatgaaagcaagcccagttctatgagcctctgttttattctcctgggtgactggggggaagactccccatcagtcttgccatgctttctttgaactctagctaaattttctttctctttctccttcacaggaaccagatttgcatggtggtcccaaagctcaacagacttttttcatgcctgccccacttttcctcacaggcacttttcctaataaattatcctgcatgtccaatctcatcttggatgcatctcagtgggcataaactaacataccaggcttgatttttttgcacttagcttttttctgtctctcccacatgtagccagtaaccatgtcttagtgttttatctgttacctcttttttcatgtgtatagaaaaaaatatatatttccatatacttatttatatgtaatatatatgataaaatatgtaatataaaatgtatagtaatgtaaaacatatacatattttccatatatgtatatggaaaaagaggtaacacataaaacaccaggacatttacatataataaaattgacatatgttatatatatatatgtagtgtctggtagtcttaacgtttctataaatacacaatttttgtcactgccccttccttctttcccatgcagagctcccatggccaaatctccctatttctccaagtgtgtgtcactcactgtcctctgtgctgtggcccatgtgctgtgtccacagcctcctagtgttttatgtgttctctttttctatatatatggaaaaagcatatacatatttctctctatagatttatatacaatatataataatctaaaaatatagaatatgtaacaatttaaaatatgtacatatttccatatctatgaaaaaaggtaacacataaacactaggccatttatatatataaaatccacatatgtaatataaatgccaattttatcatatataaataagtatatacacgatagacttatcatatatatataaggtgaatttggaatgccctgacctgggccctctgtcagtcaagtccctgccatggaggtcattcatggctgccacaactgagacaccaatagaaagatgcagctatgaaaaggtgaaaagttctaaagttgtagcaaatagcaatcagcctttctcacatcccaaaaccttcaaaaatatctgagtgcagcatatccaagatggaattaaaaacttcaatcttgaaaaggaaaaaggaaactggaggactcacactttcaatttcagcatctactgcaaagctacagtaatcaatacagtgtggtactggcataaacgaggacatagtaactaatggcatagaatagagaacccagaaagaaagcttgcatatatgggcaaatgatttttgtcaagagtgccaagaccattccatggggaaaggacagtctttttaacaagtgatactgggaaagttggctatccatggacaattatgaaatgaacctttacctcacaccatatacaaaaaaatgaacccacagtggatcaaagacctaaatggaagagtgaaggctaccagactctcagaagaaaacataaggaaaaagcttcatgttattgaatttcagaatgatttattagttataactacaaaagcacaggcaacaaaaagataaattggacttcatgaaaattaaaacttttatatatcaaaggccattatcaagaatgtataaaggcaaactatgacatagggaaagtttctgcaaatcatatatctgataagggattaatttccagaatacatgaagaacactacaaatcaaaaacagcaaaaacacaaaagcccaattaaaaatggagaaaagactaaaatagagattttattaaacaagatatacaaatggccaatgaggacatgaaaggattctcaatatgactaatgtttagagatacgcaaaccaaaaccacagcgatacacgacctcacacacattaggatggctttgataaaaacaacatgaacaataacatcacaaaacaagtgttttcaagtacgaagaaacattgaagctctttgtgtattgctgatgggaatgggaaatgttatagccactgtggaaaaagtggcatggcatggccagctcatgcctgtaatcccagcactttgggagccgagatgggtggatctcttgaggtcaggagtttgagaacagcccggcatgcgtggtgaaaccctatctctactaaaagtacaaaaattagctgggtatggtggcatgcgcctgtagtcccagctactcaggaggctgaggcacgagaatcacttgaacctgggacgtggagattgcagtgagccaagattgcaccattgcactccagtctgggtgacagagcaagaccgtgtctcaacatcaacaacagaaaagaaaacagtatgtcagattcttaaaaaaattaaagcattaccacttgaaccagcaattctacttctggacatacagccaaaagtattgaaaaatatttgaacagatattcgtacactgatgttcacagcagcatcactcacaatagccaatgggtggaaacaaccgaaaagtctattgaaagataagtggatgaacaaaaatgtatatccatactttggaatgttcttcagtcttagcaagggataaaattttgacacatggtgcaaaatggatgaaccttgaagacattatgtgaggggaaataagccagatataaaagcataattattatatacttccatttatgtaagatagttagaatagtcagttacatagagacagaaattagaatggtgattaccaggggttaaggggagaaggaatgagagttatcatttattgggttcagaggtttagtatagtgggataaaagctctggaaatggatagtgttgttagtaacacaacactaaattgcacgcttagaaacagttaacggtaaatcttacatatatagtgtctggtactcttaccctctctataagtacacactttttgtcgctgttccttccctgccatagggagcttctgtgagttaatctccctatttctccaagtgtgcatcactcactgtcctctgtgctgtgttccaggagctgtgtccacaaactcagacaggcagtgacttcagagccaggacacagccctattcccattttttaaagccttacccatgggaggcttggcttctactggccgctcgatttagccagattcagaacaggccacccaggcaccttatccacatgccctagtcccagcccgggtggagtcagggcagggtcggtcactgggcgagcccacagcaatgcagggagcagagtctgagctgcttctccctcaccaaggggcttcctcctctcatttgggaaaagtatgggcttgttttgaagactgatgttcatcgcagctcatggagtacacacacacagacacagacacacacaaaggagacaggagggatgttttggtgacagaaacagcttgaccatgacgaccctcctctttctccctctgtgaaggcccttacactgcatagggcttcgggctgataaagccatttccctacatttctcaggctggactcaaggtcatccaccagaaatctggaaaacaaagggaagagaatctgtagatatgaattgggagtgttcagaagaaaaatttgagatttattttgtgcatgggacacaggctgagaataaaaatgtcttcctggctctttcttggaaagccagataggcttcacctgaaagcatattgccaatgctccagcgatccacttaccagggactgtgattttcttggttgtgaagtttttgccattagtgactgggttatggacataacacagatagtccccactattctctgtagtgacttgggggataaagagctcttgtcctgtttgctggttattcccattcagcagccaagaatactctgctgatggattagagcccatgaggcaggagaggttgaggtttgaccctggatagtaataggtgtctgaaggataagttgtgggttcatctgggccatctggagcaaagagaataaagccacaggtaatgttatcagagggaatgggaagctcctggtctgtgaaagggacacagtgttcctttttgccaagtcacaaccccgaagtcccagccaaacttcctctgtgttcactgaactggaggagtctaagatattcacctgtttctcccatcacaagctgtggaagctgagtctcctaagaccggagaagcccctgccttcctgggcctacttaggtttgcctgggacaggaagtcatggccagcttgggggtccaggggtaagtgtcttcatacttggacctgagagggacagagaggtctggcctagggttatgtggatttgggccggcagccttgtccatgaaggaaaagaggatactcacagagaacatccaggtgactgggtcactgtggcttgtactcactacattcttcctttgacattcatagagtcctgtgtcactccttgtgacactgagtagagcaaggatcctgttatcattggacatctttagcctgggactgagtgtgagtttatgacaatttacccaacacatgtagattgtgccatgagtctcaggttcacaggttaagaccacagcctcctcatcctccgaggggttgctggtgacatagggcttgagcagattcgctgtgcagataacagagaagattcccctgtgtggcacccttgatttctccatgagcattttccaatcagagttgacatctcccacctctcagccaatccaagtccttaaaagcccacagcaggtctgtgtgtcaaaagtcagatggatgcatgatgatctgagggctcagaggccatggggccacctgctctgtgtgggagatgcacagacttctgaagtgtggatcgagcagcaatattggtgaactctgaattgagcagggtcaaacaattagagtttgattaactttgtttaaattgagaagagtccaagtgaggcagcagtggctcacgcatctccccacccgaaggaccccaccttatgacaatgttgttattatgaatacacaggtgtgcatgaaacaggcagtaaatcagacagcacccacctggccagctccacctagtcctaggaaccatcagtattcccattatatgtatgttacagctttttaggctacaaaatataaaatacgactacagaatataaaatatgctattgttaatacaaaatattgaatatgaagctgaatatgttgttccactttttctcactcttgttaaactttgctgtttcaattttggaagtttctattattacacacttaaactagagattctttcctcagctgtgtgcagcctacgagtaagcccatggagggcattctttatttcccttaaagtgtttttaatctctagtatttcttttgcttctttcttagaatagccatctctgtttaaatcacccatctattcctgaaaggtgtctcctttttccatcataatccttaaccagagttgttttaaatttccagtctgataatttcagcatccctaccacatctgtgtctggttctgatccttgctctgtctttcaaactgcatttttttttttgccatagtctgtcttgtatttttttgaaaaccacacatgatgtactgtgtaaaagggacttgagtgagcaggcattcagtgacatggtggtgagtgtggggagggaagggttctgtgattctggatgtggtctgtgtcctgggctgtgaatgtcacaagtgcctctcaggtttttgtttccactaggtggaatatgataacttgaggaggctggagttggttatttcccctccccctggccagttaagctcccatcaaaccccagctaattaggctgcagtaaaatagtttctcttaaatgtaggtcttaccaagaagaacataattcactgacaaccttccaagtgtttttttttcccttcttcctacaagaaggaggtggattctttttggatattgactgtgagaaactggtagactccaggagctaagagtcataaatctgtccccctactcccaagactaatccatccactggtgtgtttatctctgtgctgtgtccacactgagcctccagaatttcctgaattacagttcaggttttctgaccccagcactggtgcccactggggtttctgtgcctgtgtttctgctgaggtatggtgcatgctctgtatttgcctgtgggtctctccaatatgtgggccagttagcactgagaccttgcttccagagaaatctaaacgagttgttgatttttcagtttgttcagctttttacttcttgttagaactgagtgaaaatttttaagctacttacatacctgatggaaattcgaagtctctagggcatgactggaggatatcagccccacagcaggttgaggatggagtcatgagtgaaatgggtgaaatgagcccatgggctttggaaactgcagatctgtccttctgcctctgaccccctggtgagtccatgtagaaagagaaaccaccattgcaaagcatatgatggtgagaggaagctagcttggctgcccgcatctcacctctagtctcaaactggctctcttctctgattcctgggcataggccagggtaagcatgggaggaatttatagtttaactttaaagcaaggatgataatagtccctccctaaaatcagctcctccttgtcggggactaccttggtaaatctaagaaaagaccacaaattatgggaggggcccaaattctgctaaaatgcaggcatagtttctataatctcttactgctcaggagtcatgtgtccagaggtcacaagatttgtgactttcctagttgctcctatagatagcaagactactgtagaatctgagatttatcttttgagatgtttctcagacttttgcattctggcaaccagctgacctcatctagactcatgaccaatggctcaaccagtcatgtggcccccactcagaggcagattcaacaaatacataccattttcctacctgcatcattttatctccagccagtcaacagtacttattccttagaccttcgcccctcaaagtttttgaaaaactctaacctcagagccactggggaaggtgatttgagtcataataaatttctgtcctcctgtttggcagccttgggctaagtaaaactattctttactacacatcaccttcacaataaattggctttgcctgtgcagagggcaagaacctgtcaggtgattataagaatggatggagcagtcactgatctctttctggtggtctgtttcatgagtcagcctctcagagggaaagagccctggactgggacacagtggaagctcattctcctggtgacccggggacattgcctcattacggatcctggcaagggtggctactctggctgattttggtgcatttttcatttcccagaaggcaggacaggcctcagtgtgagcaggaaggaaatggaaccatcaatcttgttagagagggtgtctggggaagtcctcagggtggaggaagctggacaggacagggctcatcaggtagaattaaagggggatgcacttttttcactgaacacctttcagatatctcactaactctggcctcactgggctctgcctttccttctgagccctgagccctgagccctgattcctggagggagggagagagagaggaagggtgaagctgggatgtgtgctgtccaggtttcttccatctctggaatcttgaaagcgagggaccctagtgtgttaccacagaggagaccatgggaaaaagctgtttctcaggggtgcctggcttatgaattgaggggaattcagaccaggttggacttgtgaactgcagggaccctgttccatgtcagcaaccagctcctctagctcagtgtttctctctgtggctaattcttttgtgtgatttctgagcccatgctagagtcctcctcacgatgcctgatggtcagacctgtgtggggagacctaatgatggggtgggggtggtcttgagtgtcacacagagtgtccagggaacaggctttgtgactttctctaccccagccccacaacaagatctggatagtgggcttggtcagataaagtcagaatccatggagggagggtatgtgtcctggcagtactgaggttcctgcctccaggttagttctcagtctctgcaaatacatttatgttgtgcttgtgctgtctcctggactgtttcatgtccttaaactcttgaacctgtctgcagataatgtcatgagaggtctgcatggaagtgtatgagggctatcagattagggtgggggtgttttacatagtgggttttttttttcaccaaacacgtttcaaaaaattgtggttgagtgtgtatatagaaacacatacatacttatattcattagatgtgaatttatgtttatataaatttaatatatagatacatatgtctataagtatacacgcatatgtatatgtgtatatatatgtatatatgtatatatgtatatgtgtgtatatatatgtgtgtgtctgtgtgtatatatatatacatatatatatatatatacacacacatatatatatatataatgtgccattttaactacttcacttaaggggagagagagagagagagagaagagagtttccactaataccaaatctgggttaaataagggtggtcctatttcctggggttgggcttttgctagatgtgtcagttcctgttggaagtgagctagagaggttatatgcttaacaaatgtagagattttctatatgaaaataatctgtgagcacattgataagttttatcctttcctaggtgaaaagcttggtgaaggattttaaggacttcccattggctgaaggctggcaaatggagtttgccatcctctgactacagccattctgaggactggaaaggataccctgagaagtggcctattttatttctgctggaaggtactgaggtttaatttatcttatggagtcttcctagattagaaggctttgagttgtgttgatgccttgccagtgacttagctgcctgatcagtgaacctatttcctttgtctacttcatctgttccctttttgatgttccctataatgtatcactgctatttctcatggaagaaaactgaggataataagatgttaattttttggtggtattttataggaaatccattagtggtaagaaaatgccttttattttaaatggcagcatgagcatgaagaactaaaaaagcatacttggaatcaatgtaaatgttagctacctttctcttgcttaatttaagtacccttgtaagaactatttgtttagctgattgagcacctgcacctgaagagagatgttatttagagtgactactgcttatcctgccttatatatttcttgctttaccagctgtttgctagctaagcgctccctctagaggaaagtaattttgccacattaagtggaggtgtaaaccgttttttcctagggttaatttggagacttttctgactagtggagctattgtgacagtggtttggaagcaggtgtaaacaataggtcctcctaattgtaaagtacaggttgagaaaaatattgtatttgaatttttaatgagacaccccttatggttgtgctatgggaagagaggaggcctggataagaaaggagaaaagagagagactggatctagtgtttagaaggacgtctactttctttcctataatttccagaatcacctgtgtctcctgtgctgtaatggcagtttcagctgctggagccaggggtttgagccccaggacccatcagtcctgctggacaactgtgagactgcttctgaacccagtgacctccatctctgggagcagttgcatctccagtggtctccaccacaggctggacagggtcaaggtggcttcctcttgctctttggacactccttcctaaaatgccctggcctgccataccgagagcaactagtggatacacctctgggatcctggactttgcaactctgcaaagcagctactagaggctttgtccttctcttgagctttctctctttcttctgggccttctcctggtccctattataaaagactgaagtggctaccctcagaaggttttccaaggtgctatctgctactatagcttgcatttgtaggttccttctaatattgggagatttctatataataaacttatcttttagaatgggctgtcacttgactgaatcaggagataaaaaggtgtgtgctaatagtgcccttctcaacctatccataaaggctgcaggattctcatctggcttttagtctatcctagacagtttagagaaattaagaggtctagccttagtttttcttttccattgatctgcagagctattggggtttcaatcagggttgtcaagaggtactgcttcacttcttatttggaatggtgtttctgctatttcttcactttccatatctccttccttcccttttggtgtattataggagatatgttgctcatctccaaaattctctgctgcttgcagagctgcctatttttcagctacagttagggtttggtttaggagcagcataacatccttccatgtgaggtgaaacacctgacttaaattctggaaagcttctatatacctatcaggattgtctgaaaatcagcctaagtcttactttatttgcctaaggtcctgtaatgagaagggaacttggaaggatcccaaattatggagtttcttctcagatggttcccttggaatttgcttttctaattcgaggggattattctttataggcctgcctgatatggctgttaaaaaaatctgggttgctgttacaatgcttgtaaaggtttagtaaaaatgtcctgtcattgtgcaaaatagaatgagttgcttttctcttcaaagtcctgaggttaaaagagttctagtgcctcagagtgcactccagaggggtgcaagctgaagatgctctgttagccatctagaaaaagaagtgaaaataaaagtgtccttatagtcctcctcctttcattgtgacccagagtggagtggaagacagtgggagcatccccccaactgttttctctccttggctcctgagtcctggcactgtgtaaaatgtgccgcccatggttctaggtgtggccttctaagccatggaactggataaatgaagtgatgggattagccacactttacccatgtaaccttagcttatctgcctgtgatctgcctggcttcctgaaaaatggatctctggagaaactgtagcagttgcctttgagcaagctttctttaacagatggaatgtgccagtttccggttatggcccgtgctaaaacattttccctcagaaaagtggtcctggttaactctgttcttaaaatgcccttactaattaaatcgtgttctaattggagatagaataagtaccttaaatgaacatagggacctaatggcagtttttcctgctgatgggacagtatcagaactaaaatttggctacggaagacattttactcctaactgttgaaagcagagcttccccattcacagaaagggcttttctatcagtgcaaaaagagagaattttaaaagtgcagtgttatggcagaggaccaaaaatgtgcctcatgaggaggatttctgcttccactaggtgacactgttggcttagaaataccatgtgcttaccaaaggaaggagagagagagagaggaagggacctattgggttagttattatagcatttaccgatctttcctaacagaactgttccctgaactgtaaaaatttgcacatattgcatacacagaaagaataggagacatagagaccatggatagaaaggaagaacaaatttgcaacaggatagcaaattaggagacccattactaacatctggatgagctgctggaggctgtgttcaatccagaagcttttgaataacatcagggtgtgtcctggccagaaattctcagctgctccaggacatcccccagcctcatgtgatggtgaggttctccatgaaaggaaactagtttgaagagaaccttgaaattaaaggagagatttgaggtttgctccatactcaccattctgatgtttctatcttctgatcacaatcccggataagaactcccaaataaaatggctctgtttgggaatctatccatggttctttgtcacacactagaaagaattcaggacatggaaacacataaagagtgggtttaggagtgaaaaatttaacagataaaaaagaagagagagagaaaaagctttttcatactgagaaagcagtcacctaagagagggtctccaatttggggtggaatgcaattgattttatacagagacttgaggaggcactgattgatttacatagggtccagggggttgttttgaccaggtgtgctgtttacatagcccgagaaaagactggtcctcccacagtaatcttttattatgcaaatgtgacttctacctggtggtcaccatgacacctgcacttgtggtgacaaggaaaaaagaacagaaaccgccatattgggagtacctggctcttagttgcctgcatctatatatgcatatctgtgcttgcagcctgatcattcagtattttttctgttagaaatggcttgggggctgctttttattaaaggaaaattccaccaagaattcttttaccctttctagctgcctaaaaataatttctcaataactcctgtattaggacccctttaggaaaacagaaaagatgacacagactctcctgtaggggattaaccatagttttcttttctcatggaatcccaagagttgcaagtgaatagatttctctcaggtctaaaactctgttcttctctccgttgtgttacctgacctctttgccttttacattactttgtactgtaaaaatatttgacttgtgtgtgtaatgattgccaggtcagtggtaagagctatggttttgaaggtgactaacagtggttataataaattattctagcttcagagggctactcatttctttgcatgtttagatacaaaagacacagtttaaacaattaaggaaatgcctttgtagcaaggtactctgtgggagtgttgcacagtatggtcctcattgcattttcctcttcttggggacctgggattcagtgaaatccttgatttttaatgtctaaatgttgtcccttccaactggttctcttttttacatatttaaatgattagaatctaaaaattgcatagacattgttgtccctcttccttaatgggctctatcttgagcacagtgattcagttgaagaacagagaccaaattaaaagctacatcttttaagaaacaacaggtgctggagaggatgtggagaaataggaacacttttacagtgttgatgggactgtaaactagttcaaccattgtggaagtcagtgtggcaattcttcagggatccagaactagaaatgccatttgatgcagccatcccattactgggtatatacccaaaggattataaatcatgctgctataaagacacattcacacgtatgtttattgtggcactattcacaatagcaaagacctggagccaacccaaatgtccaataatgatagactggattaagaaaatgtggcacatatacaccatggaacactatgcagccataaaaaatgttgagttcatgtcctttgcagggacatggatgaagctggaaaccatcattctcagcaaactatcgcaaggacaaaaaatcaaacaccacatgctctcactcataggtgggagttgaacactgagaacacatggacacaggaaggggaacatcacacaccagggcctgttgtggggtgggaagatgggggagggatagcattaggagatatatctaatgttaaatgatgagttaatgggtgcagcacaccaacatggcacatgtatacatatataactaacctgcccgttgtgcacatgtaccctaaaacttaaagtctaataaaaaataaataaataaaaccccatggtgaatttctattatttttgtgttaccttggcatctttttaatcttccttgaacacaccaaattttttcctgaaagagcttaagttctctctttctctctttgctttgagatgtaaatgtgctatgtattttctctgaaactcagtaaagccttcctcagataaatgttaacctttaccatttacaagaaagcaatttgaatccaactttcctttaaaatggtgggttttaccgatctcatgcctaaagccctaaaatcaaaattctaaaatctttttgtctctctctatctttatgtgaacatatatatgttatatgttttataacatacatgtttatgtcacacatttatatactgttgacacatagtttcaaattaatgtaaaaataaatgagtactcacaaattaagtgaataagcccaaatgcttttctatacatgtgattttaataacctttggtgaatatagttttaaaattgttggtaaaataaagaagaaatgtcttcgtaatttaatttatacgtttttgcctatgtctgttggcaggcaggcttatattgtctttactaggtgttttaaggtcatcaaacagttgcttccatatatatacattttcttaatttgtctgtgagcttatgtctttatatttgaagctttaaattctgagttctagatgagtgaccacagtaagaactggggacaaaacccatcccatcctccagctgtgccttttagccatgctgggagagatgagattatccaggcattttcttcatagctctgttctttgtcttgggctttgcttgtggtacatagttagaatgatttactccctagttttttttctactgagaataaggctgtatgagtctgtttttacattgctacagacaaatacatgaacctgaataatttataaagaaaaaagtttgaatggtctcatgattcagcaggttgtagagtaagcatgattctggcatctgctcaactttcgaggaggcctcagaaaacttacaatcacggagaaagccaatggtggaggaagacatctaatataatgggaactggaggaagacagcaagtgttgcacactggtaaacaaccagataaaaactcactgttgccataacagcaccaaggagaatggtgttaaaatatgagaaaccacgtccatgatccaatcacatccaaccaggctccacctccaactttggagattacaatttgacatgagatttgggtgggggtaaaggtccaaaaaaatattattctccacgtcatccctcccaaatctcatgtctttctcacattgaataatataagaatggcttcccaaccatctctagagtcttaactcattccagcattaactcaaaagtctgaaatagcaagtttcatctgagacaaggcaagttccttttacctatgagcctgtaaattcaaaaacaagttagttactttcaagacacaatggaggtataggcattgggtaaatactcccattccaaagggaagaaataggctgaaggaaataggatacaggccccatgaaagtctgaaaccttgcagcacagtctttaaaacttaaagctccaaaataatctcctttgaccccatatctcatattcagggcacactgatgtaaggcttaggcttccaaggttctgggcatcacaggaatattccaagagagtcacaaaagaatttgtagtgtggcttttgatgctaaacagtgtattagactgagtaagtcactgaagagaaaaaagtcagaggagaagatgagtgagggtgacagaaatggaatggtgaaaggaaaggtctgataaaaatgtttatcggctgggcatggtggctcacgcctgtaatcccagcactttgggaggctgcagtgggtggatcacgaggtcaggagtttgagaccatcctgaccaacaaggtgaaaccccatctctactaaaaatacaaaaattagccaggcatggtggcatgcacctgtaatcccagctactcaggaggctgaaggcaggagaatcacttgaacttgggatgcggaggttgcagtgagctgagatcgcgacattgcactctagcctgggtgacagaatgagactccatctcaaaaaaaaaaacaaaagtttacccaggggctcatctggtaccttgctctgtgactaatatcttacacattttgatttactcttccactttcattttctgatgcgtgaagggtcacccttctgctgaagatgagaaaagaggctgagggagctcaaatgagtggtctagagtcatccagctacttcacagagcttgtgtgtttcaccttgacgttgtgcacagacagaaaagtgagacacagaaggaaggcaaagcaagtttttgttgtgggtgacatttatgaaagttacctgtgttggcagaataacggactcctaaaatgtttgcaccctagctctagaacctgtgcatttacttttcttggtaaaaacacagtgcaggggtgataaaattaaaatcttaagatgtggacgttattctagattatctgggtgggcccattgtaatcagaagtgtccttgtaagtgacaaagaaaagcaggggcatcagtctgagaatgatgagcctgtgaaactccactggccaatgctgagtgtgagcatgcatcaaaagacaaaattacaactaatgtagttatagattttattttttgtttattatttgaggcagctcttactctacaaatatggtgacagccctccctgagctatacaataacaaaacagtgggttttgtcaagtgggaaccagtaaacaaagccatataaataaataaattggtgaacattagggtacttcaggtctcttttctgtaaaagttaaagcagaggaaacttttattatgctatctcaggtagagtggaatctcctgttttcaaccaaaaacaaaggtctgttctggtatctctttgcttcattaaaatttcagttgtagactgtagcatttagcatgagtggttctattttggagtctctaggctctcacttaggtgagtgtgaccaaaatttaaagcattggcattcatctcagtaaccatcatattgggcttccatcatttataggtttatgatgtcttcctgatcacacatttctttgagtttttgtcatttcagccaaagagagaccctttggtatttgttgatggctgcacacaaaactttctaaaaacttttgtagaattcaccacaccaaaatgtagaatttaaaaacctatagaatttatcacaccagagaggctactaatatgactattaggagggtaacaccaaaagtttggagtatgcactttaggcaagatgcaaaccaagcaaaatagaatagatcaaagaatgagccagaagagtctagcaattttaaccaagtagtatgtttggtaacttctgtgattgagtcattattatactcgatacatttgtttatgtgtaacaatcagtgtcagaaactgcacaggctcctccctgttcagctggtagggaacaactttattatgtagcattcgatggctcattaaattaaaacagggagtgaaaacaagtgagtctgaaaatgtaactttaaaagggccactgtacatttgaacaaacaattgtgttaaagatgctgctaatgtcagccattgggtggactaaatgatatcttctgtaaaactttgagggtgacgtgatatatctgtcactctgttacgctactctcagaagctacttcacgtgagattctaatgataccatcatcctgccaagtgaaagaggcaggcataagcatggacaaattaagaggggtaagagcctgattttgatgtgaagacttgttctggcaacttaggaaaagcttttcacagtgtgaagttgtcaacttcttatcctggttttaagtttgagtgtctgtagttatggtgtcaaacatattggtgagctccgagtgactcatacttcaggcacgagggttttcctgtgaaatttacattgagctttccacctccagcttataggacttcagtaacagagcagattttgttcttactgattcaataagaaaaaactggatgggaggaactagaagaattcagggtctagtccagtctaccggtgaataataaaaactcaaaaacaatgaacagagctgcagtttcatagcaggtatactacactttttatttgcaacattatttttctctctataggcatatctatttttaccaaagataaacccagtaggacaaatttgtttacaaagtaggtttagtcttatgaaactttgccgggattctttacataggtgcatcaagagtagcaatggacgacagaggctcttcctgaagtttgcttcgctagaagtttttataaggagtctcagattaaacttttacaaacctctcaaaggccatcttcagactttgcctgcagtacttatgggtccattctatgtatattctcaaatataacatctcagtcaaaggcttggtaatataaccaatgttttgaaacgtgcccttttgtaaagagagaagattcttactaaacttgtgcaaataactgtattagcataaacatatgaatactcatgaatagtttcccaatcctgggacagttaggtaaagagcaaaaataaatggacttcaattattgtttccaaaagtatactttaccaaattgctttagatatagatagcttaaaagaagaaaaattccataaatctggaaaaaatcatttaaagaatcagcaaattttcaaataaaaattataaaaacattatccacgttatcatttatttcaatgaaattatttttgttctgcttggtctaggttggcatatttcatgaaggcatcaaccagtctgttaaagctttgaaagtctatagacagtccagtgatataatcttgaactgctcagaaacttgtatgcaagagtacttgtcagtatcttttccataaatcttttgaaatagaagcaattttggactgtagctgattgcaactgctttcaggaagaatcaaaacaactatctgtgaatgaccatcatgtaaaatgactattgctaaaactctgataagagtttgatataataaagagagtaactccagccagtacaccagtcatgatgctgacattggccccaactgagagatgaaaagaactttcttgtcctgaaacagctgtcatggaaaaaaaaagaagagaaggaataaacaataaagacagcaagggttttaaccaattattttttgagatagggtctcactctgttgcctaggctggagtgcagtggtgcaatctcagctcactgcaacctgtgcctcccaggctcaagccgtcctcccaccttgctctcctgagtagctgggactagacgcacacaccaccatgcatgcttgatttttgtatttttgtagagatgggcttttaccatgttgttgaggctggttttgaattcctggactcaagttatccacccaccttggcgtcccaaggtgcaggcattacaggtgtgagccactgctcctgccggtttcatcctttttataataagaatgaactccttatgtaataataaataaataaacagaaattatttgctttggatgtagcaaatgtagatttagattgtccagagtcaggagctaagcctcattttttttttttgttttagctcagtgtagagtgcattgaagttgtcctaaaaataattccatatagtaagccaactttaaaccctgctcacagccagatctgccaagagtgagccacgtaaaattaccaaaaagggtggttctgactgactccttaacaataacgtggcttacaaacaaagactgatatgaaatagttgatccaacccaaacactttgctcatttcccaaaattttctatacaaacatatacaacttaccacaacgtaaagatcataatgaaaggtttgccttttattcgtttaaatgaccatatgtttagatctgatgtactgacagtgataattctccattaaacagaaacctaataaaatttgaaaaatagtgatttcatatttagatgatactcagatcttctgctacgtatgtggaaaatggaattattgctagaaacattgtttaaagattagggtatgaaagaagtattaggaagtcaggaggttctttctttaggaagcagcttatctggattcattcaaagagctttaggccagtttgaggtctttctgcaaaatgtaaattgctatctgagaaaccatatatagtccaatgatgaaagaatgcaaagccttagaagcaccggagacaattccagtatcttccctaaagttctgacaaaaaggaaaataactatcaaattattcaactcgaatgcttattatgtatgtataagtcagtcggcagatgaagagaggagggaaatatgacttctacccttagggaacacatagtcttgtgggggccactaggggtggtggtgtgacctgcctggagcagcgctaaatatggacttgtgagtcaagggctatcaaaacctaagtaaactgatggccgttcagagaaggtagagttccattccacagtttgcaagaaggactatttcatggaggaggtcatgttggactagacctttaaaagttggtagaatttaaagggaaggatatggaagcaggaagagtgacaatgagcagaggtacaggagtgaggcaagggtgagcaattttaattttttaatagtggtattataaaatgcacatcaaaatttgccatattattattattattattttggagacagtgtctggctctgttgcccaggctggaatgcagtagctcaatcatggcttactgtagcctccacctcctgggctcaagcaatcctcatacctcagcctcctgagtagctgggaccacaagcatataacaccacgcccagctaatttttatatttttgggagtgacaagatcttcctatgttgcccaggctggtctcaaactcctggactcaaatgatcctcctgccttagccccaaagtgctgggactacaggtatgagccactgcacctgaccccatcttaaaaatttctaagtgcacagttcagaaatacatttgcattgtgcaaccatcagcgccacccatcttcagagagtatttttcatcttgtaacagggaaaattcatatccatgaaacactaactcctcatttttcctcctccccaccccaggtaaccactattccagtgtctctatgattgtgactgctctagggacttctataaatgagatcatacactgtgtatctttttgtgactggcttatttcacttagcataatgtcctcaaggttcattcatgttgtaacatatgtgagaatttttttccttttgaaggctgaataatatttcattgtatggatagaccactttttgtttatccattcatctatctatggacacttaggttgccttcactttttggctattgtaaatagtgctgctataaacatggaggtaccaatatctgtttcggtctctgctttcaattatttttgctttatacccaggagtggaatggccaagtcatacagtccctctagttttagttttctgaggaaccaccataatgtttttcacagtggctgcaccattttaattcttatgaatagtgcacaggggttccaatttttccacagtctcattaacacttattattttctggggtttttgctttgtgtttgagagtagccatttaaattcgcataaggtataatttcattgtggtttacattttcatttccttaatgattagtgatattgatcaatattttctatgcttgctggccatttgtatatcttctttggagaaatgtttattcaggtcgtctgcctattttgttaaatcgggttgattttttttgctgttgtttaggtagagaaagcaatctttgaataccagtgatgtttcactaatgctgggccactgatttcacaagaagttgtatgaggtattggaatgtgtgtttggtttcaatcatggctgaggttaaatgccttttccaaaattcagtgtgaatttcaccagaagccacaaaggatccaggagcaagaacatggtgtgactgctctgtgctaaagaatttcagcctgatgacagtgagcaggctacacatgagactaacacaagaacaggtggagagggagactttccactggaagaaggtgattctaacatgcagaatcaccttcaaggagcaagtaagcagaaaaatagacaatggcacagtggccaggcaagaagacactaggtccagaatctgaggttcaaatcctggctctgtgagataaaaacatgccttggtttccccatgctactgaaacaccaggggttgggtctaggtcccattgctcactgcacagaaagccaaccactgagacaatgaacattgccagggaagaaggctttatttgggtgctgcagccaaggaggtgggagatcagtcttaaattcatctctccagcccactcaaattggagggtttatatagctgggaagggaggtaactacctgcagggaaaacagcaattaaggaggggtaaggaagcaatcatgataaatgaagagtctggtgtctcattctctgatggtgatgtggtgaatttcagtctcttgcctgaaggtccgtttcctaactcagatgactgacaaatgttaagtttcaagttttaagaccggatgggtcaatttctatgtttattcaaaaaccctgtaaatatcagttctatgtggaacttgagctggtttgcccccagttatcacagttagtgttaaatgatgcaatataagtaaaacaccagcagtttctgacacacacacagagtgcatgacacaagtggtgtgttgggacaatatagctcagtgaactccctttgtctactcagttatattgagcaatgaggcatctctgaagatgccactttgctacttctcccctgataatttcaccagatccagccatatgagcactgcaagtggggacttagcttaaatcattcctcatatttcccatgcaggtaaatcatttggcaccaaaacaggcacagaagtccaagtcctgctgccagctccacgactgatggcacagagagacttcaggattagtcctttaatctctgtcctctattaaatgaaggtcatcatgctgctgcctaatgtaaaaggattgtggggattttcatcattcattaatgattatcttattctttgaaaccccaagaaaactatataaattccaaagtctaataggtacacaagggctttattatggatgattaagtttcaaaggatgctaacccaaaaaatttttttttcttttttgagacagagtcttgctctgttgcccaggctggagtgcagtggtgcgatcttggctcactgcaagctccacctcctgggttcacaccattctcctgtctcagcctctggagtagctgagactacaggcacccaccaccacgcccggctaatttttttgtatttttagtagagatggggtttcaccatgttagccatgttagccaggatggtctcaatctcctgaccttgtgatccacctgcctcagcctcccaaagtgctgggattacaggcatgaaccaccgcacccagccaaaaaaaattttttaatgcactctcttttccatataatcccaaagtcggtgaatcacctctaagtcaggtgtttatcttagctgatactgccttagtgttggcacaacttaaatttagttcaaataatatttgcatgatctttgcacaacacataaatgcccaggaacaggtggtgctcctcggtggtcaacaccaggattgctatggcagggcagattctttctctatagcccaggtcactggcattcaaagaaatatttttcaatctctgatttttctctggaagtaggaaaatgcttccctaactgctttacttgtaaggatgtttcttgctaattctgtgcccagagtaactaatggggacatagacatagacatcattcaaatggcattctctctttatgataacccatgctttaaaatgaaataaaccaaacccatgccttaagacaacagtcaagaaatacattctgcctaaggaaaagtcctgtgtttgaaggttgttgtccaaataatctgacgttgtggtcatgaaacattgaaaatagcatttggagcagtaagtataaaaaatttagaaggactaaaactacttgaatgcttgttgggaggtttacaatgtagtcaaacaccagttaagcaaaaataaaatttactacttaactgtttacattttctaatgtgtggtttcatggaattgttgagatagaagtagacactgaaataggagtacttgaaagtaataagacagagatttttataaagttatttctgacctaattaagaaaaatataatctctatcacatatgaaataaacaactttagaaaaatgcaatgtcaaagaaaacacttggaatggccaacaaatatctactacagatagaaatgaaaatatttatgttatgtaaatgttgggcatcaaattgtctccgaagttgccttctagagaactttgtttagttggtgtattcttcctatgaatcaaaggaatacagtcttatgataataagtaatgagggataggagacaattttaaggattttaggaaagtagggaagcagtgaagtgaagggtaggcagatacttcggagggtaaaaagtgtttttgattcaaaagaaaagctaaggtagtttgaagaaaacatgcatcatctactagttaatctggggtacaatgaaggtggtgttattttagcagtgttcagaaaagaccagttaattctgtggccatacagaacgaatggaaagattgcaaaaaacagattctgaggaatacaaatcaatctagcaaggaactttatgatgaaggaccaatgtaagcatagaatgcactgtattttttattattattattagcagcatcattggtatggtgatgttacctacttttggagtggagctagatatgagagagctgcatgtcccttgaactttatttggggtaaatagtgaaaacaatatctatgatgagttaatgggtgcagcacaccaacatggcacatgtatacatatgtaacaaacctgcgtgttgtgctcatgtaccctagaacttaaagtataataaaaaaagaaagaaaactatatctaaataaaaaagaaaacattccagaggtgcagaattcaagctagaagaattgtgtccttggatgtcccaaggtcaaattttaatatgtcattgaatgaaggttccaatgtttggaataatgaaaaaagtcatattgaattttgtctttgctgtcctccctccccagtgtctaccaaagaggctgagtaaatattcatgcaagtcaatacactgtcacagccacaattcatcctagcaatctttcctggaatagtcacttaagacgtatctggtgaggacccattggcacttttagagcaatcagaaaatacctcaaattgctcacatctagtgtaggagaaggctaatccatccctgtttcatgaagcatcacttcaatatcctgggacagtcattctacccaaatcttctctccctagagcccaacactctctgcatcttcatccattcttcacggggcttgatttccaagactctctaccatcttggccacacaccatgttacacattcactatggacactgcaccactgcggatgctgcaccaagggttctgaatccaagggcagattgttatgaacagcccctttaaaagtcttaaacgtgatacactggtctgtcagcagatgtgcagagcctcttatgggagacgcaatatttgactcatgtgattcaatgtccataagtcttcatccgaaagatgcccatagagacaaagagcagagtaaagtccttgcagcagtgtttctcaaacttagccacccaccagaactgcctggggaactttgaaagatacccatgctgaatcccacccaccaagattctgatgtaatgctatggggtgagatctggacatcaggatgtttggaatccccccaggctcatttaacatgcaaccaagagtgaagcccactgtcctcagcaatgtgcccagcccggccttcctggcatccccccatgggtacaggatgacagtttctcactctgaccctttcctttattcaatacagcacagcacaatccaacagggtgagcactgttatgacagagaacctcgagtcatatctgattaaatgtcttcaacaaaaccagtgacaatccttggccattcaactatcaattactactttcaacccaggttctaaaggctcttcattagaaacatctcgggttgataatgactggggcaaatgtgccctttggatttgattgctaccatgattattaattaaccgaattgtagagatatcgagtacatttctccctcttgtttgtaagaacccatgagagacaaggccaattgcagacaatgaggacgtcctcataatagtgagatgaactgcctaggtatcttccgatatccttacttccctccagttttgttgcttgcaaaacaacagaatcttctctccatgaaatcatggttatcagttaggaagtagcccacttggttctggatttcgtttagagatttaagatagtaacagagggtgcaggatgacaaacagaatttgtacactgtgtctggtagtggaaaatacccaacagtgtactgtatgctgactctgtcatttcctgccttctctcctcctttcctccctcccttgctccctccctctctccctccctccttccttccctcatgaaagcatagctcgtttgccattctttcctccagtcacaagccatctactgatgcacatcaccatgctcatgccattaccagggactttctatcagcatgaagacatgaaaatgcctgggggagaaagggtgtggggagcaggtagcacccctgcaactgcccggtagcatttatacattgctctcccaccttggtttctatccatggctttcctcgtcagagcatgttcactttaacctcctctagagcaatttcttggatccttcaagggctcaagaactaagcataagttcaaaagaaactgagtaggcacctaccttctggaaacaacatccatagaaaagacttgattgctatggtctgatttatgaacctgtatctcatatcaggttagcatttgcactagcattaaggtattttcattgagatcatttatgttttgaaataaatactacaacatcaagaaactgtatcagttggagaatagcaatgtgtatgatttgtgtatataaatatgcacatcaaagcacttatttatttcagagagttgtataacaccgtcagagtaaaaattgagtgattctcttctatttctgaccctacttctaatgtctcctctgtccctctgggcaaaaccatttaaaccttttatcttggtttcctttgtgagaaaatggggataatagatacccctgagccattctggagacatgtttggatgccagcccagttatgtgaacacaggagaaaaaagctttgagcttttggcactaaggtgctacataaatattattagcaagctgctgagattttatctttggaaactaacaagcatttctcttctaaagcctcatatctttagcccccggacacatgttcctgatagctctgtctttacagagatccccttggctccacaaggatatagatagtgctttgctgagagagtcactaccgcacactcagatgaaaggtattcattctgcttggcagagtcatcggtagagtagctgctgatcccagcaaggcacggtgggtgatgggaagggattagattaggaagaaaagggaacctctcgttctctcactgagaggactgtaaacctgcagaagcacaacagtgagtggactacgtgtaagtgccaatgtgcaaagtcgatagtgcacacgttacaggttggcgagagatgatgccactcagacctgagtgcaccgtggaactctcttgaattctctctgcaaatgggttgcccctggatgtatagagttattctacaggagtcctgctcctaactcatcagaaacgtaatgacctctgttgatctcaaaggcattttcttctgttaaaagtattgtccattcagcaatatggagaaagatcatttgtgaaaataaaatagaagtgtctgatggtagtgggggtggggggtgtaatttcctccctatgtgagtagcattaagttcactcttaatttttttcttcatttctgtaattggagactgatttatcaagaggatatagaattcagtgactaattctattaaatgtttaaagaataaaataaaagtagaattcaaaaggcttactcctgattagttttcaagatgtgtctaggcacaggaagttaaaaataataccacagtgaatgctctgacccagtgctaacaaaagcttccttattttggtgagacttggcatagaaaatcacacatgtcattcagcggtcctgaaaaaggatgactgagatttggactggttttccagggaataaaattgagtgactttttaaaaagtgctactcctagaatctgggatctaatcaatccaatatcaacttcaagggaataggccaacaaccagagatgaaactagaagacaaataattagaatagcaagcataggttggttttccatgctatgattctgcagcaaatgtggtaatttgggaatactgatttggggaatctcttgtcatgggaataagttgtgttttgtcagctttgctgagtgtctctggtgagctaaaagtgattaaaacagagtgctggccctggtatgtaagctgtaatctatactccatatctaccactagccattttgaaggaggagagttccctgatctacctcacgggatgtgcaacaggcgtgtggctcacccgcttagttgctcaaacccctgatgggagatggagcacacagatgggcaggtgcaggggctggagtgagtgctttgggctccagcctggcagtagtgtctggaggaggggtggtgcctgcagcccaagtgttacaatgctcttttagtcttgctctctgcaaatggcttaagtgttaaccagctcaatagaccttctgccatttcacaagggtagagggccagtgtgacagctttctgtattcccagcctttgcccagtgtcccagaagaatcgggtcacacacacaggcttgaaggatgaatgtggggttttactgaatggtggaggtggctctcagcaggatggatggggagctggaagggggaatggagtgagaagatgatcttcccctggagtttggtcatccagcagccaatctcccctctgaccacccccagtttaactcctggcattcacacattccttcccttctctctttctctgctgtgtcatctgccatttgtctgcttgtctcctcatctcctcatctgcttctggagcctggcgtttgggatttatatgggtacaggatagggggacatgtcagggaagaaggcaacttttcccacttagggccatgggtctccaggcttgagtgtagggcctttgctggggaactaccttctttacccagtatttccctgtctcctgtccatatcaatttcatgaatgtgtggtcacaacatgaacccagaatttggaggttggaaagtaggagtgaatgcactcaatctactagggtgccaattcatagcatctaatatggtaatgatgaattagcaatagaatcttttggtaggggcagacttagtgaatcttcaaatgtggcaggattttaacatgaatcgaatactatctctcagtcaatacaattacctccaccactccccagttcctaattcaagggttatattttcagtaactttatgtattcaaaactgtattagatgctagaaatacaaagatgagtaagacattattaatctctgtccataaaaagatgaaaactagtgtggaagacagccataaaattagagattaatcttatctagaaaattctagaaacaggatgaagcacaacagaggagtattttaggcaacctcaaggcatttaacccaacctggagcctttagttaggttagaatatggccaggaacaggaagtcaagattcaacaaattgcaacactgcaataataactaacatcactttctaatagtgtttatagtgttttctaatatgaaatcaaaatctgtctttggataacttttactcactccctggtcttgtttctgttctctgggatgacacagaatatatggaattcactcttactctgcttagtactgagaaagcaaaaattaaataaggcattcaaaattcttgtctgtataggggccaagggaaagcttccccttcaccctctgaaggtttgctgataaccaactgacaaaaggaagattcacaggagaaaaagcttaaatatttatttgatcacagttgtatatgacatgagagcctttagaatgaagaccaaaagatacagaggaaaccgtccatttttatgcctaggttcaacaaagtatggacagccatgtagaaatagggttggattcttcttggcctctctgagcagtgcttcttccttctgggtgtggggaaaattcaccatattccttaggtcccctcaaaggcccctctattcactcttttcaggaagggcgagaggaccaatgaataaccaactttctggaaaggggggtcttaagacctacagtcaaacaaagtaggtcagatcatttcttcttttgttttctcttttcaagaggcagggtctgattctgtcacccagggtgaagtgcagcggcctgatccatggttcaccacagcctcaaattcctggactcaagcaatctgccagtctcagcctctgaagtaggtaggactacaggtgcgtgccgacataccacactaatttttaaaaatttttgcagagatggagtcttgcaatgttactcaggctggtcttaagctcctgggctcaagcaatcctcctgccttggcctcccaaagtgttgaaattacagatttgagccaccacacccaacccagataatttctgtatggcccgtttttacgcagaaatgtagagggaaaattagagtccgatttttaggttttatggctggctttggggaaaaggggttctgatttctagtacccatcagggggaagagggattctagtttctaaggtgcctccagggagaatgggactcagagacaggaaggcagaagaagctcagagagaaagttttgcttctgaggctctttcagaaggattgcttgagctcaggagttccataccagcctgggtaacatttcaagactccatctctacaaaaaattttgaaaaaatagcctggcacatggcatgtacctgcagtcctagctacttgagaggctaaggcgggaggattgcttgaggtcaggagtttaaggtgtggtgaactttctgaggctttgattttgtggtattgctttctgagccttagacctagaacaagcattcaggtcatgggggaagttcataggagaatctctattttttaactatcaaactgtgactcccacattggccacttggggatgctgtcactcataggcctgtcatacacctttggtgggtagggacaggaaaggagattgagtagcataagataaagtcctccccaccccacccatttcaataataggatccacatttatcatatgccagtctgagacacttcctgaacttcacgattcatacagtgttagagagtggtctatacctttctccatgacctccagcccacacgaggttcagtgaccctaatgccatggaggccaggatgctgtgattgagatgagagcaggggtaagaagggtcttttctctgctcatggagcactggaatgaagtatctttttgggtgctggacagtggggaggtcaagactgtgggcagaggaacactggagccaatgttgggaataattctcatgcaagcaaagatgtggtatttggctggtcacaaccccagaccttgagactccagttccacaggggtccaggatattgtttccatgtacaagatccatctgtgagaatccagcactttccaccacctgccgtggtatggctgtggtcccatgcaccatcacctttggcttcaacttctgcaatgaccccctaattgataacctggctcttgagttgaccttacagcaaacattctttttgaagaaaagtcacaggacttcaccccactggccgaaaccctccactattagctgccactgcacacagagtcgaagcctaaggcattgcacttacacattttcatgttatattattgcatagatgttattagtttctgagtagccaggagagcattttttctgcaattaaacatatcgaatgcaccacattctttaggtcccctcaaaggcccttctattcactctatgtcgggaagggtgagggaaccggtgaataaacaaaggtccttgtttaaaggctgttatgaccataaagtctgtgtatttcacagcccatgacagcagcatcctgagatattatttattgtcaaacttctcaggccacacatccactgcaatggggaatgggactgagcaaatcgcaagttcttggttctatgttccagttgcaatcttgctttcagttttcctgctgttaaaacagcttttgctggtagaactgtgggaagtgagaatagatttccttttacctgctgtgcatcagcagaaaaaacaagtctttcttttctcctggcagctgagatttctgagttcttcctagaattggatgttatatatgatctactttactcatgcccacctgcatacacaccaaagcctgatgagcggtacaaacccacccaatgttttcccccaaaacagaagtaacatgagcacatgtggaactgtcagaggtgtttgaaccagggcaactgcatcttgaataggagcagggtaaaatgaggctgagacctaccgcgctgcattcccagacagttaacgcattctaagtcacaggatgagataggaggtcagcacaagatacaggtcataaagaccttgctgataaaacagtttgcagtaaagaagctggctaaaacccaccaaaaccaagatggccacaagagtgacctccggcggtcctcattgctacattcccaccagcgccatgacagtttacaaatgccgtggcaatgtcagaaaattaccctatgtggtctaaaaaggggaggcatgaataatccaccccttgtttagcatattgtcaagaaataaccataaaatgggcaagcagcagcccttggggctgctctgtctatggagtagccattctttcattcctttactttcttaataaacttgctttcactgtatggactcgacctgaattctttcttggcgagatccaagaaccctctcttggggtctggatctggacccctttccagtaaaagaactattcattttatcttttagtcatcaccaagcaaacacaattataaataaggaaaataatatatgattgtaattttactcataatcccaaatgtctctcatgaccagcacacctttggtgtattgggtctaaatcaaagaaaaattcgaggagttgaatgaacaatgttttgatatcttaatgcactttggagaaaaccaactgttgcaaaaagctaaagaaacaaaaattcattgtttatagatcaggccacgtgtttttcatttctgcaatggcgatgttgttgattcccatggaacacaatgagagtgtgatcttctcctttgagattgtatttattgataaatgcaaaaatgctaatgaatcctaacttgctggttctccatggccttccttcctcccgccctttccaagaaggatgcagtatctgtcagaggcatttgaaccagagtggctccatcttgagtgagggctaggaaaatgagacttgaacttgctggtcggcattcccagaaagttaggtgttcctagcctctagatgtttacagttaagggaatagactgataacgttcagtaaacagacccagaattgggagtgtgctattgttctggaacatcacatataagtaaaggagggatttcctcttctgaccaagaaggaataacatagactggcttaactctcgtacctgaaacaaccagaaaaacaaacaaaatatacgaaagagtggttttatgactctggaaataaggcaatgaaggacagtgctccctgagagccaggaaactaacaaggtgaacaccatgtttggcacagctgactgccttgacagggctgtagggcacacaacccactctggggaaagaaccatctgaaatagagaaaatagtgcatggtgctcacacagggctggaaagagtgcctgtttccaccagccagactgaaaaaaaccttgtaatgcataagccatttggctagactactcagaaaggtcttgtgtgaatagtggggaatatttagctgcaggctgagtcctgctctgaatctccctaatgattcacaatagcaaggctccaacgttgccaattgtctccaagtaacttaacccaaactgagcagatcgctcaaaaatgtttgcaggaatataaaaatatctggcatcctaaaaagaagactcacggtgtttggcatccaatcaaaaatgtctaggcatgcaaagaagcaggaaaaaatgatacataatataagaaactcatcaacagacactgactaagaatggatgtatatgtgagatcttatttttggtctcaagattttgctgcttgtttgcttcttgaagtctcatggttttaggttttatatacaggtctatggtctatcttgagtaacattaggatgcgtgtatgtttatttgtatgcattatttgtaggcataaaccgaagttcatttctttgcatatgaatatcccgttgttccagcaccatttgctgaaaagactatccttttttcactgaactgttttgtacctttgccaaaatcagttgtgcatatatgtgtgagtctatgctgttccattgatctacttgtctatctttatgccaataccacactgtcttgattactgcagctttctaacacagcttgcaatcaaatagcatttgtctttcaactttgttctatttttcaaagttaaacatcttaacattattaagtcttccaacgtgtgcccagtgtatatctccccatttatttatgtctccttttatttctctcaagaattttttgcagttctcagagtacgagtcttatacatatcttctcacatttattttgaaatatttcatatttctgaagctattgaaaatagtattgattcttcattgctagtatataaaacagtacatgatttttgtatattaagcttgtgtcctgtcactttgctaaactcaattaataatagttcaggtagcttttttgtgtattcaattggatttttgtttatgttgtctaggcataaagatggctttaccacctcctttctaatctgagtgccttctattaatttttgttttcttactgcaccggttccgatctcttgtaaaatgttgaatagaatggggagagtgggcatttctattttgttcctaaacttaaagaaaagtattaagtttttaccattaacaagaattttagatttttagtagatgcccttatcaggttggctgaaggagttcctttctattcttagtctgctgcagggtttaataagggctggagtttgggttttttaaaaatgctttttctacatctactaagatgatcacattgtttttttgtttttgttttttcatcttttttagtttgacaatattgtgggtaacactgattggtcttcaaatgttttgaaacaatattgtgtttcaaattacttcttacttctgtgacataacctagccttctctctctttttttttttttttttttttgagacagggtcttgctctgttgtccaggctgaagagcagtggcgcgatctccgctcactgcaaggtccacctttccggttcacgccattctcctacctcagcctccctagtagcagggactacaggcgctcgccacttcgcccggcaatttttttttttttttttttttttttgcatttttagtagagacggggtttcaccatgttagccaggatggtctcgatctcctgacttcgtgatccaccggcttcggcttcccaaaatgctgggattacaggtgtgagccactgtgcccggccgacataacctagccttctttgtctgagtgtgtgtgcatgattaaatagatcacagtatcacattctgccaggacccacatggctgcaatgtattcttttaccagcagagtagcacctgaatctgagcaacgcctcagaggcgatggaactgaacaggagtgaatctgcccaggcatgaagtgctcccttacaaaacagtgtgattacagtttgtgttctccggtgtaattacctaggaggatttcttcagtcttccgtaaggaggaagacagtgttccccactactcagagaactgttgtaggtgttcttcctgctttttgaaaaactgagagctgtggccagcctgtcagaacacgtcctcttcttttgggcatattcaggatttgcttactggtctgttcaccctgatagaagttactcttctctgtctgctatatagattaacaccactcactggaacttccatttcccaaaattccaattctgtcttaaaatcttttctaagcacggcttctctctacatatttggtgcacccttcagtgattacaaagatactccaaggtcctgccatgatactgaacaaaattcagatgtagcaaaagtgatcaagaaggcagcaaaggcttatcattgtggggatgtagtacaacctcccagctgtgaagccttgcacacatcactgcatatatctctgcttgacttttctgaacctgaattactcggtgaacagggtaccttgcagtttgaatgaccctcaagctctcagaacttctccaactttaaagcgccctattctaaaagagaactgtatttgttaactccaggggagacaagcttgtcacttcagccttccccttatttaaaaaaggtaatttgtgctgattctccagtacaaagcgcttaagtcaattcgtcatagaaagaccgttaggtgtaaagtgataaatatactatgtcaactttgaaaatgtattagcacttttcaccgtaaaaacttcagatttcacaggtcagcaaagagagtcttttgtttaattgttttgcatcatcaaatatcaatctgtagggtaggggacatctcatttagggaaaaaggtaggcacacctcactttacagaaatttctgctgaagccctaaattagtgcgttggtctcccccataagccttctggcttttagagaacagagactgcttattcttatattaaactggggaaggtgttctatattgcataacctctcagaagtataaatgtgtattgtttctctttatctcgaccttccaagggccccagcagcctgcccaaggcttcactatccttgcaacaatcatggcacggtagtgatgggaagaaaagctgcaggctcagtgctccttgccttcagggaatggtgctgattcctgttgcaaagcagacccattatcagaggcccatcaaatcacaccattcccttccctgctgtctcttaggcctgcaatgacaaagacatggcagaaatgccactatccctgctcctttgctttggccagatgccactgatggatcgttcaattcttccctgcagaatcgtgccctcagatccttctgacagtgtgccagatatccagcatcacctttgcagtttgggaagtggcacccatcatccacccagcgtgcctttcttgattttgtccatggtgctgagattctgcgtggcccccatgcggttgctctcactccatgggtctccatccagggtgatgcacaccctcctaccacctgtgaacatttggtaatatctagaggcgttgctggtttccaccattgggagtgggtgcaactggcatctagtgggaagaggccagggatgatactgcacatcccatgttgcatagaccccatcccacagccaagaatgatcttgttaagtgtcagtagtgctgatggtgcacagacagtgtcccacagcaaagaataatctttttaaatgtcaatagcatcaaggttggggaaccctggtgtgtctgagaaggaaacgtgggattctctctcctctaggattggattctgtcccgtggtactgtctacaatgactgggattttgatacctaaatcttcccttaggaagaaatctttcctcaggaaacttaattatcctgccaatgctcaccagctggagtttgacttcatatttttattggtttcctggaaacctctcattgcattccctcaggcatccacgatacccaaaccatgcacatgagtgacacactgtgtttagcttgcacagcatctcatgccacaaccattcccggcagattcagctcattctcccatcgcagccctgctcccctatgcccggttaccagcaggtctcccaggtgagcctgctgctccaggataaaactgtggccacgagccaacactgaaaactgacacctgcggaagttggctcaagtgctgcctgctaacaaccgaataagtaaacctttgctgcagaacctaccatgtaacaggtgtcttctaatatttctctgatttttctgagcttatcctaagataactttttcacacttcatttgcagagcaggaagacattatgtgtgtgtgtgtgtgtgtgtatacacacacatatatatgagaatatagagagaatatatgtaaaggagaatacatgtaaagagaatatataatatatatagaatatatcctatatatttagaatatatagaatatagttattctatatatagactatagactacattatagtctatatatagactatagactacattatagtctatatatagactagactacattatagtctatatatagactatagactacattatagtctatatatagactatagactacaatatagtcttatatagattatatatagaatatattattttctatatatagactatttttctatatatagtttatatagattatacatagactatattattctatatatagcttatatagattatatatagactatattattctatatatagcttatatagattatatatagactatattattctatatatagcttatatagattatatatagactatattattctatatatagtttatatatattttatataaagtttatatactgtttatatattgtctagactatgttattctacatatagtttatatatagaatgatatagtctgtatattgtcctagcaaactcatagactttattattatttgatatatagtctagtactgatagataatattatcattcaataaaatatatagacatatacaagatacatagtctagactatacatcaaatgataatatagtctttctgtactactatatatagtctatatatagaataataatatagtctatatattgcaaggaggaagataatggctcattttttatccagggtaaaactcataaacatgtattactgagtacagatatcttaatagagacaagaaaattcaaattattggcaaggtactgtacataattgtatccaaaaaaatcaggctattttgcatcctagccaagttactctgcccagtcacaagatcacaaaggccaagttacatgatcactaaaggtggcatgagaggctccgactcatccagggagtaagagagtgaagtcagcagtgggaatgttggagcagctggtctgtgtaaagatgtcctggggaaaaactgggtcaggcttggaagacaaggcaagcggtaccagagaaataagcttgactggaacgaggcagcaacagaggcactgatggaactccgttctagagttatgggaactaaaaggtactccgctcggccagccaccaaatgaaatgggtaaaaagggctgcttgaaatgtaactgggaagatttcataagcatctatctgtatgggtttgcccggactgacataacaaagtgccacagaccgggccgcttaccacagacattgattctctcgcagtcctggaggctggaaatctgagacaaggtgtgagcggggctggttcctcctgaggcctctctcctgggcttggagatgctgtcttctccctgtgttctcccatggtggttcctctctgtgtaggtctatgtcctcatctcctcttcttataaggacaccagtcctgttggattagggcccactctagtgaccttgttttaccttaatccaatcttgtccattctgcagccctagggccacatgcagcccaggacagctttgaatgttgcccaacacaaattcatacttttttaaaacatgagatttatacacggacctgttttttcgctcatcagctattgttagtgtattttatgtttggcccacaacaattcttcttcttccattgtggcccagggaagccaaaagattggactcctttgccttaatcacttctttaaaggccctacctacaaatacagtcacattctgaggtcttgggggctagcacttcagtgtatggtatgggagagggggcctcaactcagctcataacagcatacttctaatggtggttctcagtctttattttgaggaaagtggtcacttaaataatgacatatggaaaagatacaatttaagtaatagagacttcccacgcaaaccccatgtaaggggaggaatcgaacgtatcaagggcattccccaagcccaaggtgatagaggtgagaaatgctcacttattagtgccaatttcaatctcctgatagattttcatttagtatgctgtaaaagaaaatatccctgcagacactggcacttgagggattacagtggtggggagaaattcccttatttatttgtggaattcaatgaagcatttcagagtccaccttctggggataacctgttcattgcaatggagtaaatcaatagccttcatttagattcttaactggcaatttgatctcattcactttaaccagcactcattggctggaggaatgatggagactgggagcaggctcctaaaaagggtcttgaaaatgttatttcaacaaagattaattatgaggcattgagagtttcagaaaggttcacattttttttctaaagctcttctaagccaatcttaaatgaatcctcagaggactatttctgtgggtgtgtgtctgcttgtgtgtgtgtgcatgtgcatgtgtgtgtcttgccccattccagttctccatccccatgctgaggaggctggaggattcagaatgcagaatcaggtgcatttttaaaaaatcattatgtcagtcctcaccaaaacactggctatttctatctttccttctcattttactctgctataggagtctaagtaaatcatctttaggaaataccaaaacctaccaggggttttagattcatggcggccaacacaacctagtattgatagcccatgtaaatgtttgccatccagataacaagaataacgacaagagaaaactaacatgacctgccccatagtgtgctagatccacatctcttggggaatgttttgaagcaagttaatacaagctacttgataaaaggcttccgtgatgaaatgagattggggaagctgagttaaacaaaatcaaacagtgttctgtgttggacacttctcaaatccttaaccatgctgaaaagcttagagtatttccaggagaatagcatagcaccccacatcccagacctgcacagcccctgctcaggccatcttgtgggacaaacagtatgcaaaacacacattctggaacatgcttgagtagaggggaggccactctctaacttgggcacagttctgctctggcacacactgacaaggtgacactgggtgactcatttagtccctctgtaaacggcccttcctcatatgcgagaggccatggaacgttggcctctcagacgttactggctctaacattattttgccaaaaataaaataattagtgtggatgtgttataggaaaggggtctggatacagaccccaagagagggttcttggatctcaccaagaaagaattcaggtcgagtccataaagtgaaagcaagtttatgaagaaagtaaaggaataaaagaatggctactccatagacagagcagccgtgagggctgctgcttgcccatttttatggttatttcttgacgatatgctaaacaaggggtggattattcatacctcccccttttagtccatatatggtaacttcctgatgttgccatggcatttgtaaactgtcatggctctggtgggaaggtagtagtgaggatgactagaggtcactcccgttgtcttcttggttttggtggagttccactggcttctgtgcaacctgttttatcagcaaggtcttcatgacctgtatcttgtgccgacctcctgtctcatcctgtgacttagaatgccttaagtgtctgggaatgcagcccagtaggtctcagcctcattttacccagcctttattcaagatggagttgctcttgttcaaatgtctctgacagatgtaataggtaacgctcagaaactggcatcagaggctatgcaacctgaacagaattggctgacatatatctccgggtataaagaaagtctcagctttcccctgagatgtaatgatgaatgtccctaaagcttccttcacccttccatgctaaactcgctccactgttccatcatctgctttgaagccacaaggacagccagttaggactttgtcatcatcacttttaacttttgtttaacttttaacaaagattggcctttttaaaggctcaattatatttaaaaaaaaaacaaaacaaaacttcctgccacttacgcagtccattcattttaaacaaagttgataatgcaagtcaatgggaaaagaatagtctttttcaacacatggaattggaaaaactggatacctatatggataaaaatgaactttgatcccttactccatactctgcacaagcattaaattaagatcaactgagatttgacctgaacataaaatctaaaattttgaagcttttacaataaagcaaaggtagacaaagactccttctacaaatacctggcactaaacattaaaaaatcataaattgtgcttcatcaaaaatacatctgctcttcaagatagatgaaaaggcaattcactgactttgaaaccaagtatttgtgttcagaatatgtaaaggaattctaaaactcaacataaaaagacaaaaataaaacaaaaacacacgcaaaaaaaaaaaaaatagaaaatgagcaaattatttggacaaaaatctcccaaaaaaggaaatgcaaatagctagcaatcacaggaaaagttgctcgatattattagttatcaaggaaataaaaagtgaaaccatgagatactcctacccattagaatggctacagttaaaacgactgacaatactaagttttgatgaggatgtggagcaattggaatgctcatgtattgaggtgagaatataaaatggtgcaactacttttaataactaccctatggctcaacaattccatttatagatatataccaaaaagttatgaaaacatatattcatccacacaaagacctgtacacagatattcattgtagcattattcatgataacttcaaatggagcagaacccaaatgcttaccaaaggataaatggataaacttactgttacatattcatataacgacatactactaacagataaaaaaaggaataactattgttacctgcaatggaaacatatataaatctcagaaatagtatgttgttaaataggccagataccaaatagaatatgttgcatgattccatttatataaagttctagtagaggcaacatgaaagccatggtaataagaacagcagttgcctgaagttttggggtttggtgatatgaggaaattttctggagtgatggaaatattctttatctttattaggctgatgttttcacaggtgaatatatttgtgtaaactcatcagaatatataaaggatcctacaactcaaaatagaattttaaaaaaccacaaaaagttattgtgatggttaatattgagtgtcaacttgattggattgaaatgatataagtattgctcctgggtgtgtctatgagggtactgtcaaagaagattaatatttgagtcagtagactgggagaggcagccccttcctcaatttgggtgtgcaccatctaatcagctgccagcgtggtaggataaaagcaggcagaggaacgggaaaggactagactggttttgtcttctggcctacatctttctcccagctggatgcttcctgccctcgaaaatcagactccaagttcttcaactctgggactcggacctttgaacacagactgaaggctgcactgtcggcttccttacttttgaggctttgggacttggactgacttcctggatcctcagcttgcagatggcctattgtgggacctcaccttgtgatcacgtgagtcagtgctccttaacaaactcccctttgtatatacatctatcctactacttctgtcactctagagaaccttgacgaatacggttatgcatttttattaatgtaaattatgccttaattaacaataaataccttctcaacctccaaaaagagactttctgtctgaaacttgagaataagtctaaagttttcatttaataatgaatttgtaaaagacaggaaaattgattttggcattaatttgttcaacaaatatctgttgagcatgtcctatgtggcagaggctgagtgtggggtgtggagtgggtgaatgtaaggaacatatagttcctggctccctagagcttattatggtctaggggttggagagaattggtacattgggattttaaagggggtgccaaaagtggtgatgacaaagttcagggaagaacaactggagtggagggagggcatcaacatggatgctgaaccaagccaatgtactgctaagagtgaggtggaaagtatcatgcgaaccccagagcttcaattgtcaatacatactggggtgtgaccagcagattgatagaagacagcaaagagagatgggtaaatgccaatagagcagaatagcatgacttgtcaagagacaggacttttcaaggtgaaaggaagggagatggtcctgaagcagcagtcatgtctgtgacccaaccaagccctaagcgatgacagatagaaacagagtcagggtcctcagaggacaacttagttttaattaaggacagaagttgagaagaatattttaagaaacatttgagggcatattacagtttgctggctatgggttagggtagggtagaagagagagatttggaataaagggtatggatgggacaagacaaagcagggcaccagccctaccttggacctttccttaacttgagaaagtcatgtccatgttgattcagccaatctgactcaggtattatgtaacttgaaattgaaccatcccaactgatataagtggtgatactgagtaacacaaatgtgctttctggattcacacatgcacttttttttacatgaaaagttcaaacttctatgtggagatttttttcaacagtatcctcaagaagtattcatcatgcaactctttctaggaaaggtattttaaaaagaagaaaaatgtcatttctggccccagaatgtcaagacatacatctctgagagatttagttctaattattattgtagagtcttgtgggtgtttcttataattttaatttttacaaaaaacaaatctgtccatccatgcatctatgtatgtatgtatatatgtatgtatctatcttcatcatcatcataattatccatctatgatctatctattgtgtatctatctaataatctacctatgcagaactgcaaaattcacaggactggcccatactgccctctgctccccactttgtctaaacttcaaaatgaagtttctggacacagggctatgaaatgcaaaatgaaacaactcatgtccaaagctctgacactctgctgctcatgaaaacctgcaatatccaactgagtttttcatttttaacatcagcaggtctagttctctatcttcatagagagttatttttaattttattaggggataaattcttttttaataaagaaattattaggtatcaaaataccacaatctctttatggatccaactagattatgtgtatgggcaaagtattttcaacttaagaataacattcctgttccttgaatactattttgaaagtttggattaagggatattaacttccttaagacaaaacagactcacagttgaaaactactcaccttgtatatagaagttgcttaattaatatcaatgatttttattgaattggaacaaaatagactataactttttataagatacatatgggtttgttactaaatattattaaaatgaatgtaatgcaataatattcttattttgaggtaatacatatatagtctgcaaaaattaggtttcctggtgtcattaaccacttatgcaattatttttctgaaatgaatacacatgctgtacgtgcagttttgcctgatataagttttaaaacaacgtatattggaatcttggaactaaaaatgagaaaatcagtgtccccttgatgtcaatttcagtttcaactacacttgctattttatttttaatcagttacttacattatctccacattgtcacagttgatggtatttgttttcttctctgtgaccataatttgcacagatttaaccataatgcatcgttaaagattacaagaaatcttttagacacagctcctctcagttgctgagagtccaacctttactcatttgttttcttcatgaatatatatttcctgagttgtatgtttgtacatagctatttgtagcctttgaagtttatggaagtttgtttggttgcattcttggggcacattttctttccctgaggactgttaaggttaggatatttgaccctttcaaagctcatgttgaaatttagtccccaatattggaggctgggcctaatagaaggtgtttgggtcatggggacagagccctcccattgaataggttaatgtcctctcctgatggtgaatgaattcttcctctattagttcctgcaagacctgcttcttaaaagagtgggccacctcccggtttctctcttgcttcctctctcatgtaatctctgcacatgctggcttcccctcctcttctgccatgagtgggagcaggctgtggccatcaccagatgaagatgcccaattttgaactttccagccaccagaatcataagccaaatcatctcttttcctttataaattatgcagcctcgggtattctttatagcaacacaaaagggacaaggactttttatatcttgccccactgtcttctagcatttcatctgtcacataaagaaatattagcctcctaggtttttttttctgaatatccacagaattctttccataacttcaaataccaggaatttattggggtatttgttaattattcaatataaacacagccttgtaattcttgggctatttctgtctgcagattcaaatttcattgtatttcaggaatttcaccttgaattgtatctttgaaaatttgttttcatgttccattcattttttaacccatgcaaggcatttagtgttaaagatatttgatctcttccctaccacccctcccatccccctctttttctctatctctgtcttccgtcttttactttttgttcttttccatctcacttgctcattttttcttctcaaaaccatcctttgaattccttcagtagtgtctcatctcccttttgctgcttctatcatgacctttgattttggtctctttttgtgtctctctctctgagattctgaggctctgcctattctgtttttattctcatttgtttctaatttgtttccaagactctgtctactcccttttcattctcatttattcctaatttatttctgaggctttacccactcacttttcattcccgtttaacctaatgtattatcagttcttccttaaagccttatattgcgtctttaaattctcatttcagagaaacaatattgtctttaattgattccttagaaataactttgttcatggtttttggctccattgtggtatataatctttccaggtgttatcgtcataaatcatgttctgtcctttttttttcatttcagcatcattttaaaggcccccagctggctctaccctttttaagtagcattgttcctcatctttttaaactagaattttgggcaaagttctggtgaaaggggaagaggaatgtgccaaacaaatgggaagattgggtttcaatctgttatctctaggatttttctcagctggacttggcctgtgggttatctggtccagcatagcaggacatcttctgggctcacaaggaggctgtgcattttacagaacattttaacgtgattattttaccttgacttatcttcaccaggcagctttgggcaaagacggccaggtagcttttatcttattgactcttccttctatcctatgccatgattgaaacatgatgtaggcttccaaaaccaggccatgaaccttgatcttaactttctaagcatgggatagacacatttcctttcaatgtgtgccactcatccactttggataactacgagctgagtccactctgcctgagtcacacatagaaagacatcttctcttggatttcccaaatacctccatccacttctcatacacttggctatcttcctgcatctactgtgatccagggttataggggacctgtagcttcatcaaagataacatttgtttgtttcttcttctcttgtttgctttggattggtttcataaaggaaatcagacaaaaatatacttacactaccatttgaaaagaaaagataaattccttctttcaaattcattcctttttgtttctttccaatgaatctcatggggtgagggggggactgaagagaatgtccaatctagtcaaatccaaaaagtcacaggtataaggcacagaaaattttaccagtctaatgatggcagttttaatgctgtataaggacagactatgcaaaaatgctattaatgaggatgaggagctacaggaagaaacctgatgaggaactgtaattctattagagggatgtatagagccatcatttttttctttaatccaaaacaattagattgcttatatcgacagccacactgaattctaagctatttgtttgaaatgcaccagaggatgcagatatatatatatccttttaccttaatttaaattttattctttccctcccgttttatctgtgctatagagtatatttttcccacttgagctcaacatgctgttgtgcagaaagccttctcttgggaattcccaaaatgttggcccagatgagtgcagcagacatttggcctaggtgagcctagcagatatttacatgaaatattagggagcatccatctgggctatgtgacttaggctggcaatacacgaaagaggattccaatttgttgtataaatcaccctcagagcccccaacagtgaacacatagggggttcttttcattttcatgatgcttaatataatctttaaaaataattaaaattaggtgaagtgtgtagatttctgagagattacagaaagacattagttttgatacctcttgcttgtagcatttgaccaacataaacaaacgaaaaggtttaaaaagaacagggattcttcccagtagtatagtgcaatgggtaggggaaaaaagttcaaaattgatacatagaccaatattattctcaaaactcataccattgtgattgggaagaaatgaatacatgttacttagtcacttcatgttactatatacttatattaaaacaacaaaaaggaaattataggaaaaaaagtcatacatttaaaggatggaagaaaatcctaggtttactcagagctcaagatcccattgggatgaatattgttctttccttggattgttccttcatttcattcattcacttatgtatgcatttatttatttagagatggggtctatttctgtatttatttatttacttatttatggagtgttactctgttgcccaggctggagtatagtggcacaatcatagctcactgcagccttgaactcctaggctcaagtgatgctcctgcatcagcctcctgagtagctgggactacaggtgtttgccaccatgccccactaatatttaagtttttttgtattgattgggtctccctatgttgcccaggctggccttaaacttttcagctcagcgatcttctgccctggcctcccaaagtgctaggattacaggtgtgtcccttcatttctaatgaaggaaggttttcctttgaatatctcacaacagatatttttaaaagaaaggcagatttgaagcaaccatcaacaaggtttacttgaaaattaatgatatttacaagtgcattatataacagaaatgttacagactgaattgtgccacacctaccccaaaactcttatgttgaaatccttacacccagtaccgggaatgattgtatttggagatgggtcattaaggaggaaattaaagtaaaatgaggtcacatgggtgggccctaatccaataggactggtgtccttctaagaagaggagatgaggacacagacacacacagagagatgaccctgtgaggatgcagggagaagacaccatctacaagcccaggagaggggcctcaggaggcaccatccctgctgacaccttgatctcagacctctagcttctagaactgtaagaacaatttctgctgtttaagcattcccatatgtgggactttgttatggctgcctgagcagcctaatgggagtgcaaagactttctttaaataatgtataacaatgttggtttggaaatgactatccagtgttgagttcaaaactttatctttatgggtgctgctatgagtgagtgtctaatttgggggcataatagtgacattcttcgggagaaatgcagactccaatcagtgcagaaaatggcacagaataatgtttaaaaatgccctccaggccataacatggttgggttaggaggaggaatactaaccattccaatcgtaaaacagagaattttgggtttctttcatgagttcatcacctctgaccttcacaggtaagggaccatcacacagacatctgccattttcatataactctctatccaaacaaaggctgaaaattcagcatggaggaactctcccagcacccgtggtcagccccttggcctgcaaccccaccctgggcactggtgtgggggtgggattctttatgaacttgggccccaattctgcttcccctggaaagctggacccacacaacatcaccttcatatgcagaccctcatgtgtgggcacctgtgcctcctcggagctggcggtcagctctagaagctggttcaggacaggatactcccatccaatctgtgcccaccatagaaaagagtcagccaagtgcctgctaccacagggctcttcacacatggaaaagctgccctgtggaagtgtcccaggaaaggtcagggggacaaaaaaaggtcacagtgatttgcctccagacactggacactcttccctggagagtacagggcatgctgctctccaaacctgatcttgctacatttgtgctgcccacagtaggggtgtcactgagttttcaaagaagacagcaggacctgaattgtgcaaggaaaataagtgcttgaattttgtagcatgcgtgcagtgttctactttttagaatgctactgggctcctctggtattcaagaaaggcccccaacagctcagatggtagttttctaatcctgtcttcccatatgcacatttacctcctccacccaagaactgaataacagacatgagtgctcgggacatcatgctgtctactgtcatccccttcctgagaccccctctccaaatctcttgacaaccctcttcttagctccctctttctttctggcctgttacactcaacctctccaacgtcctatcaagtacctgctcaaacctacttcctctcctgctgtgcttcttcttcaaaagtgttttgcttcccatcctccccttctttccttgccctcttccctgcttccgtcttccaagcacttctcaactacaaatgagaaggaagcgatctgattaaacaggtgatgagcagagtcatgttctgaggtgatttgcatttttaaaaggagattaatgaccacatctgacaatgtcaccctgaaatcttatgcagggtgacaggggagtggggatgaactccgttcagggcaggaagccagagtttggatctgaagtacttttcagatgctgaagtcataggagcttgcagttacttcctgggtggagccataaacaaacatctcttctgctgagtggggtctgagaagatagagggaatggtgacccaggagctctggaattatctgtctgtgttacacttgcaggactacacaaatttaactgaaaaaaccatgcttttcatccacctggctgaactcttagcctgctctcctcttattgttccctcgaaggcatcattttttgaaagagaaatttaaactctgtccatctcatcccctttggaagaacgttaagattcctttctgagctttttcatcatctggagtttaaaagcttcccctcctctgtcaactctctttgaatccctcatgtcacaccaaacttcaaaagagacaaatacttttgcatgactccctgcaggctctgttttgccctgtagtgacagccccacgtcttggctttcctgattggaaaaacttctcaagctttctacattcatgatctgcacttcttcagtgcagccttctccagtttgtctctgatctccaatggtccctgcattaatcctgtccaagccacaggtgaccctcatatcatctcagcttctacttcccagtctctcactctcttttttttttttttttttttttttttttgagacaggggtctcactctgttgcccaggttggtctcaaactgctgggctcaaaagatccttcaccctcatcttcctgagtagctggtaggggtgtgagcccttctgcttggtctccagtcctttgcttttcttttttgacctacacaacattcggtggttgacgtccatgttcatgtaattgtcttctctggcttctcagggccaccatgcattcccttctccctcttttcatttattatcttttcatctggtaagacccatcttcccctaaagatgtatattttcctcaaagcaaggattggcttaccttcacaaactgagtctccaatgaccacataaactgaaatgcaatagaaatcatggacagatgtgagctcttcttctaattcctgtgtcctctgctggttcttctcaccaacatcacgtactgctaagtaagcgagtgatgttaagttagaaaatggactgagtccagtaattcatttgtcatgctccaaaatccttacctgagatctatctactctccaaattatgctcgttagaaatacaggaagatccttttcacatgagctaattagggtgaatacatgtaagtgttggtaagaagtactagaaacactggaatttgtgagatttcattgaagaaccaacttccacccagcccttcacattgttctcttttggtagtttcttgtcatttcctccttttattatcaatagagctgctgtgaacatgcatgtacaagtttctgggtggacatatgttttcattttttggggggtgggtagacatgaaagagtagaattgctgagttatatgatgaatctgtgttctaacttttcagaaactggacttctactccttcctgatttcaccttccacgccatttctgtagtgaggcccactccttggccttacaagacctgaattaagttaggtgcccagagccgttctgtcattgactctgttctttcccttgctagcctgtgtaataattggcaatcagaccttcacgtgagcaatggtttcatatgtctccccaactatattacaagttccacgggggcagagctatgtctatctccttgacctctgtatctgccatgcctggcagagggctgtgaacaccggtcaccctccataaacactgggagacaaacaagggagtcagtagagttagttttttgcttttttacccccagaactcttagaatatgatttgagcttttccttcaacgaagtcctggggcaggtgatcattcatagatgacatgagggagtgcacagcacatgagtttgcaggaaaatgtaaaccccacgttgatatttgatccccaatgttggagatggggatttacggggagtgtttgggtcatgggggcagatccctcatgaatggcttggtgctgccctcatggtaatgagtgggttctctattcaatcctgcaagagctgattgttagaaagagcctggcaccttcctctcctctttctcttgctgcttctctcaccatgtcatctgtgcacacaacagctccccttcccattccaccatgagtggaagctccctgaggcctcaccagaagcagatgctggtgcaatgcttcttgtacagcctgcagaactgtgagccaaataaaccttttctttataaattatccagcctcactcaggtattcctttatagcaatgcaaaactgactaagacagggtatcaggagacctagctttgcctgcatctgagaacttcatcaggactcttggaactatttagcccacagttccaaggttgatttttgtcacagtaaagttcaggtagtaagaattctcactggtggctgttgagggtggtggtggtggggatgggtcatatggagaattagcagtgggagactagaaattaaagtggataaagggaagaattaaaagtcaaaaacagtgtgagggaggaaagcaatggatataacacctcagatctttatcctcgagaggccttaaaaaatctacttaataataatcagatgctattctacaagtactttgagactagacatgtgatgacttgtaggagcctgcactggggctgaaaatgcatgcaaatctagctgactcagctccagtcttaactggctcataacttccttcataaacatgactgtatgtcagcaaggaaatgagagagaataacagcacatcacataggcatgaaaagtatttgcaaagcagaagttcccaaaaatgacattttgcagtgttttccagaagcagattcagaaaactgaagaccaaagtaatgagggagccctatcatgcctagatgagcagaagcataccaaaggcttagtatttccccaagtagtaggcacctcaaacttgtttaaggaaaatactcttcttgatgaaacagatactgcagttgaagcaggaatgtgtttggtgtgctgccttaaatagcatgggtagatgttcaaacatgttaggactcactggccctaggaaagacccgcaagtatctggtctacaccaagaaagtgacaatgtaacaccaaacaccttttctcctctaattaccaagaaaagtatttctttcccaatggtggaagacaataatgttgggaatgatgaagttttctggagtgtgaagtggatatgtcttataagtttaattcacagcttcaccacttcataagtggataatcgaattgtgcctcagtttcctcagacttggggatattaagagtaccctcagtcaccacaaggtgggtaccaacataagaaaagggtatagcaaaatcccaggggcacatgttcttaaagtgcctagtgtgggattagaatgacaagtggtagatgacctacttgtgcagaaatttagagttattttgtgattttcaaatgatcatgtgtgctttccatatgctgtccagactgggggtgctggagctagaaagggaagaaggtttccatatttcctgagactggagtcacatcctctcaccaatgcactcacctgctgactaaccagtgtacttctgggaattgcaaatgcatgaaatggcacccattctagactagtcacggcagtgttggtgatggccacagaccaggaacgaccctgatgtttatccgtagggaactaggtcatgagccatgatcctcatcatggatactgggcagctgtggcaaagaatgaggtatccttctgtctgtgcaccgggaaaggtttccaagatacaccacacagtgagaaaaacaagaagcagaacaatgcacggtgtgctacctcttacattacaaaggaggaaatgtaaaattaatttacaaatggccaataagcacatgaaaacatgctcaacatcactaatcattaggaaaataaaaatcacaactacagtgagataccaccttacatccattacaatggttgttctcaaaaaagaagagaaaaacagaaaagaaaagtgttggcgaagaggaattggaacgcttgtgtagtgtttgtgggtatgtaatatggtgcaaccactgtggtcgtttctcaaaaaattaatcatagacttaccacaagatgcagcaattcggcttctggtgtattccaaaaagaatggaaagcaggggccccagcagatatttgcatgtctttgttcatagcagcattattcacaatagctaaaagttggaaacaagcccagtgtccatccatctgtgaatgaataaacaaaacgtggtctatacatacaaacgaatgggattcagccataacaggaagggtggttctgatgcgtgcttcaacgtgaataagtcttgagctctttctgctaagtgaaataaccagactcaaaaagacaaatattgcatgattccacttaacagaggtgcctaacgtcatgaaatgcatagacagaaaatgaaaaggtggttgtcagtggctggagggagggagaaagaggagttggtgtttaatgggtacagaattccagttggggaatatgaaaaagttctgggtggggatggacagtggtggtggttgaacaacaacctaaatgtacttcctgccactggatgtacacttaaaagtggttaaaatgggccaggcgaggtggctcacgtctaatcccagcactttgggaggtcgaggcaggcagatcacgaggtcaggagatcgagaccatcctggctaacatgatgaaatcccctctctactaaaaatagaaaaaattagccgggtgtggtggcatgcacctgtagtcccagctactcaggaggctgaaacaggagaatcggttgaacccaggaggtgaaggttgcagtgagctgagatcaccccattgcattccaggctgggtgacagaacgaggccccttctcaaaaaaaaaaaaaaaaaagaaagaaaagaaaagaaaaaaagtggtcaaaatgttgaattctatgttatatatattttaccataatttgcaataattcctattgttttgcataaaacagctgtagaaagctttgcaggtcatgaacagcatagctggccactgaggctggtgtggggctaggacctgggtgcacagggaacaggtatgagacacaggctcttcatgcctgcacacatatacggatacacacagatgcaaatttctgagccatctaaatacaacacctattcaaaaaattaaacagaaaaaggaaatgtaatggagctaaaggataagggtaggtgggcggctgctcaggaggactgtggaggccacatcacccaaactttgaggcctctcttagcagctggagtgcatcccggagacttgggaactctggaaagaggagcaggagagggccatggccagaggaggcctgaaaaagatcatctctgacacagagaagaagctggctcggatgctggtggccactgtggagacaggtagacccagggagacaactgtatgcattcaaggaggaatgggtggtgatgcaaacctaggtggaggccacagggtgcagaagacaggacacaacagagagagatgtaggacatggaaaggacagaaaggagtgatcaccggacgtaaaggggcaaggaaagtggaagcatgagagcatctgctgggcatctggctgaggggtcatgtgcccagggtgcccttccctaagggagaacccaggacaggagcagattcagaaaaaacctcccagctcactccagcaagaagcagaaaagggactggttaaaggacagggtaggaaggtcaccaagctccaagggccctcatgaagccagcttggaggccacagggcccagggcaaggaccaaaccacaggcacaggacagctctggtcaagaccttctggctaccgcaggaggcagaaaccacaccctgcaccctgcactgctgaggctggccctggggtccagaagcttctacaccagaagcttctgtccccgatccccactgaaaaaattaaaacaaaaacaaaaagcaaatcggtgccatgcaccctctgcttcctggtgctgttcaggatcctgagtctttcacgggagcacctaatggggaaagcctggacccgtgtcggtgtccctcctgcaaggagtgctgggaaaatgaactttccggcttcctccttgggaaagaagaacattccccatgtgtactggtggcatttaaaaactgcagggcagccagagaacatgcaccgtgttccaccaggagagtttccagcgggatgtcccggtgaagatgcccgtcccaaggtgggtatttgagctgaggaactgagaagctgttttctgcctagagttagagatccgagaggcatcagcacatggaagggagggaagctatgatgcctccagggtgggagatcagatgaaccaggagaggcagggcccgggaggaaccccggggagcagccgcctttaaagcctgggggaagtagcttcagagaaggtggggcaggttgggtggggggtgctggaaaaatataattaagaaagaaatttctgctcatcccagaaacccccatcacatccgtagacgtaaaagaaacctgtcttatgattaagcattaagccaaaatgtgatgcaatctgctgagagatgacaaagtcagaaataaatcccactttggatccagccaagcaggtgcaacccgttacacacatggtctccagatagacggtgactagtttccagttgaaaggactcaatggcaccatttgtcacacatagttcatcctaaattcacccagtaagtgggttgattctctgtgtggttaattggctttatctacaggaaaaacaaacctcttatctatgacaggaggtagttttgcaactgggagtgagatgccccaagaactgaggttccttccttctcacagaaactgggagacaggggcgccttctgcccggatgcctgcctttcaaagagaggtctcctatggccttgaggaggacagttctgggttggcaggcaagatgtttatgtatgctttagaaagctttacatacatcttcaagggctagagaaagaattttcaattacctcttctaaaaaataaatgctctcaaagtccagcctaggctgcatagcaagatccaatctccacacacacaataataataatcaatttgctgggcatagtggggtgtgcgtgtagtcccagctactcaggaggctaaggagggaggatcacctgagcccaggaagttaaggctgcagtaagcttggatggcaccactgcactccagcctgggtgacagagggagactctgtcaatgaatgaatgaatgaataaatgaataaatgaatgaatagaaaatgctctgagcgaaaagaggagagtctctttatctttttgcaacaggctaaacaaaatttttaaaaatgtatatttgcctcacagagattattccaggaaaagaaatggccctcagtgtcaaaggatgcaaaactaacctgtgagttcctggcaggtttagcaataaaggaggatgttgctgatctcagtacaagcaatgttagagaaaggggaagatggaagtggacgaggaccagtgagtggaaggtgacaaatggaagcaaagaaacccatccagaccattgaagatgcttgagcgagaagaaagaggcggtggagggaatggaagcccgaggaagtcatttgttgcaataggatgcctcagagcacgtgtagggtgcggggcagagcccatgcagaggggctgtggaaggctggcagggtgcaggtggccccactctccgtcaccctgaggaatatgtggtcagagttaaagctcagtctgtttctgggatcaggtaagaggtgagcgtccggagaagacaggcggatcttcagatcctgcagacctccaccgcgccctctgtccctcttgactgctttttctccatctccattgtctggctcacattcgtgtcactttttcatttctccctacccctcttttctcttttctcctctctttttcttaacccttatacctttggaagtcccactaatagaatttaaacagcttttcaagttggttttttgttcccagaaattgactttagactctccatgaataatgtggaaatcaaacgagtataagctgattcacgtctctgcaaatgaacaaataaagtctacattccaatgctttctttttccagagtagcccacatttgatttttttttttttaattactgtcacttgcaatagatttttaaatcttgtaacctggttacacaaataccatggggccaaagacttacttcctgtaagaggaaaccaggcttgactagcctcatgctggctttgaagaagtaaaatcaggggttgatgaatttgcatagggtaaatatcaaagatcgaaagtcaacaataggtggtagagggaataccccaaattataaaaaaagaaactgtttaagccacaatagaattatcgtagaaataaaccatggtccttcctgctaaaatattccacttagaattgtaaaatattcttctcaataactcctgaaagagcctattaagaaattaatgaggctgggcatggtggctcacacctctaattccagcacttttggaggctgagacgggtggatcacttgaggttaggagtttgagaccagcctggccaatatggtgaaaccccgtctcaactaaaaatacaaaaattacccaggcatggtggcaggcacttgtaatcccaactactcgggaggctgaggcaagagaattgcttgaacccaggaagtggaggttgcagtgagccaagatggcagcactgcactccatcctggatgacagagttaaactccatctcaaccaaaaaaaaaaaaagaaaaagaaaagaaactaacaaatgtaagagtgtctatgttccaaatccggtgtattattttatgcagcctttcacaagctctaaaagattcactgtgcagaactggaggttctagagaaagaccacgcctcctcctacaggtaactcttgattcaggaagcagctcttggcttatccctgggcttagtggaattcaaatacctgaccataggacaccaagggctttgggacctgaaaggcacatcatgtcctggtgacatctgagttacctggggcatgcacagccagcctccagcatcccagggagagctgtgtatggggtcaggctcaagcaggtcccagggcaccagtgacccaatgggtgactcagactcccatggcacctgctccttctgtttctccctccaccatatatatgagctcatgggaaacactgtgtgacctcttacagaggaggaaagtgcatggacttccagtttctagaactgtgatacaataaactcctgttgcttatctactcctctacagtattttgtcatggcagccctagcaaactactacagggactgtgagggttaagatgacaccaaacatcaaatgccactccctgttccaacactgagaccattccacagcctctgaatgacaagacaggccttcaaaatcaagaccacctggctaggtaagaagtactttagtcacaccacttctgaactttctcgcctacctgcagggcaggaatttttaccattttcaaatgaggacactgaagcccagagaagtagtgctatttcctgatggataagaggtgatatatttcagtcctcagaccaactctgaagtagcaagcttctagtcttaagagtcaaacttggctgggcatgatggttcaagcctgtaatcccagcaatttggtaggccgaggcgggtggatcacctgaggtcaggagttcgagaccagcctggccaacatggtgaaaccctgtctctactaaaaatacaaaatttagccgggtgtggtggtgtgtgcctgtaatcccagctacttgggaggctgaggcaggagaatcacttgaacccaggaggcagaagttgcagtgagctgagattgtgccattgcactccagcctgggggacaagagcgagacttcatctcaaaaaaaaaaaaaaaaaaaaaaaagagaatcaaccttgagccaggcacggtggctcatgcctgtaatctcagcactttgggatgccgatgaagtcaggagtttgagaccagctgggcaacatgctaataccctgtctctaccaaaaatttaaaaattagctgggtatggtggctcatgcctgtaatcccagctatttgggaggctgaggcacaaggatggcatgaacccaataggtggagcttgcagtgagccaagattgtgccattgcactccagtctggagtgcaaaaaaaaaaaaaatccatctcaaaaaacaacacaaaaagaataaatatgtggcttcatgactgtatattactgggcttctgacctagactaaaagatcagggaagagtttcctgaagagaaagtgagctatgatgggcccactgtactccagcctgggcaacgtaatgaggctctgtctcaagaaaaacatgcagaataaaaccacaaaaagataccactacagaactattagaatggctaagattaaaaagagtgaccacgccaagtgttggcaaggatgtggaggcactggaatgttcatgctgctggtgggaatgtaagatggtacaactgctatggaaagcagtctggcagcctctaaaaatttcagcatacacccaccatgcaactcggcaattccattgcattcccacattttttttagttaaaggaaaatcaagtgtaatgatctttaaagcatttttgcctgacaaatagatgaaatgtgggtagtagcccaacactccctggtcagtctatacagggcatatgtggcctcatggcccccaggaaatatggctgtttccacaagtgctgagtccactctctccatcaatcctaagatgttagttccacagcactgccagcattgggctttgtctatttctttctttgtcatttttgagagggggtctttctctgtcacccaggctgaagtgcagtgatgcaatgttggttgtaatggctcccatttcatttctaattgatcttatttggctcttctctcctcttttcttggttaatcttgccaatggtctatcaattttatttatttttcccaaaaatcagctttacattttatttatattttgtattattttgtttcaatttcatttagttctactctgatgttggttattttctttcttctgctgggtttgggtttggtgtgttcttgtttcttgagtttctagaaatgtaaccttagattgtctatttctgctctttcaggctttttgatgtaggcatttaaggctataaacttttagcatgctctttgctgtattccagagattttgatagggtgcatcactattgttcagttagaagaatttttaaatttccatcttgatttcatatttgacccaatgatcattcaggagcaagttatttaatttccatgtgtttgcatggttttgaaggttccttttggagttgatttccagttttattctactgttgtttgagagagtacttcatataattttaattttcttaaatgtattgagacttgttttgtggcctatcatgtggcctatcttgaagaaagttccatgtgctgatgaatagaatgtatattttgtggttgttgggtagaatattctgtaaatatctcttaagtctatttgctctagggcatagtttaaatccattgtttcttccttgactttctgtcttgatgacctgtctagtgctgtcagtggagtactgaagtccctcacaattattgtgttactgtctatctcatttcttaggtctagtagtaatagctatataaatttgggagctccagtgttaggtgcacatatatttaggattgtgatattttcctgttggacaagtccttttattattatataatgtccctctttgtcttttttaagtgctgttgctttaaagttagtttttttgatataagaatagttactcctgctcacttttgtggccatttgcatggggtgtctttttctacccttttaccttaagttcatgtgacactttatggttaggggagtctcttgagggcagcagatacttgcttggtgaattattatcaattctgcaattctgtatcttttaagtggagcatttaggccacttacattcaatgttagtattgagatgtgaggtactgtcccattcatcctgctatttgttgcctgaataccttggttttattcatttatttattgtatttttgttttataggtcctgtgagattcatgctcaaagaggttctgttttgatgtgtttccaggatttgtttcaagatttggagctccttttagcagttattgtagtgctggcttggtagtggcaaattctctgagcatttgtttgtctgaaaaagactgttatctttcctttatttatggactttagttttgctggatacaaaattcttgactgttaatttttttttttttttttttttttttctgagacggagtcttgctctgtcacccaggctggagtgcagtggtgggatctcagctcactgcaacctctgcctcctggattcacaccattctcctgcctcagcctcctgagtagctgggactacaggagcctgccaccaggcccggctaattgtttttgtatttttagtaaagacggggtttcaccatgttagccaggatggtctcgatctcctgaccttgtgatccgcccacctcagcctcccaaagtgctgggactacagaagtgagccaccgcgcctggcctgataattatttttttaaggaggcagcagatgggtatgcatgctcattcaggtgttcttcccttattgaagattagtaacatcacatgtgttgaaaagcatttgggattatttacttaattgatgagtactcatttatttttatgttaatttgataccacatataaacaatatattaacataggtaggggcatatacatatgtgatatgtgatacaacatagaacatatacatgtgcacataaagatagagggagacagaaacacttcagattttttattttaaaactttatgcatgaacccaaaaaactcactgttaaaaaaaagacagctggatttaaattgtgcttttgtaaatagaaaaagataacatttatctgaggaagtccttgctgagttttagagaaagtaggtagtaaatttacatctcaaagcacacacacacccccacacacacagagagagagagagagagaaggaatttgggtgtgttcaaggaagattaaaagtagatgccaaggtaacacaaaaatgatagaaatttataacagcattttataaggagaccagttttatttacatacatagcttttattttggtctctgttttccaactgtactccaggaaacacactacacaggctccctttttaagtgctggtgggccaatgcacatgcagacagcccactttaagggaagaatcaggggagaagagatgcagaccccagaattacgccaacataaaaaacctaagtcaaaggtcaaacccacacttgaaatctcatcgcctgtttcaccctgttttcagtgtactttactttctttaatttctgctctaaagcttttaaataaactttcactcttgctctaaaatttgcctatgtctcttcttctgccttatgatgcttagttgaattctttcttctgaagaagcaagaattgaggctgctgcagacttgtatagatttgctgccattaatatactttagtgccattctacatgatagaatatatatactcttatatttatacatatatatatgtaaaatatgtattcatagaggccttgaatctacattcttgctgcagtttatgtaaacaatccaggtataagactaaaacttattttggaaatacattggtcccatatgatttctgtttcataaaaatgggagacaggagggggaaaattatttttcagaagaaaacaacaaaacaacggctattaaatttgttcattttttttttaattttgttatttacctacaatttggactgaatcctaaattttttcctggctacaaatttcaaaactaatggtttcagaattttctcccatttttcttccattttggtatattataaattaaaactgtgctttttaaatttttatcttttttttattacacttttaagttctgggatacatgtgcagaacctgcaggtttgttacataggtatacacgtgccatggtgttttgctgcacccattaacccatcatctacattaggtatttctcctaatgctataactcccctggtcccccacccctcaacaggtcccagtgtgtgatattcccctccctgtgtccatgtgttctcattgttcaactcccacttatgagtgagtacatgcagtgtttggttttctgttcctgtgttagtttgctgagaatggtggtttccagcttcatccatgtccctgcaaaggatatgaactcatccttttttatggctgcattgaattccatggtgtatatgtaccacattttctttatccagtctatcattgataggcatttgggttggttccaagtctttgctattgtgaatagtgcagcaataaacatatgtgtgcatgtgtctttatagtagagtgacctataatcctttgggtatatacccagtaatgggattactgggtcaaatggtatttcttgttctagttccttgaggaatcaccacactgtctttcacaatggttgaactaatttacactcccatcaacagtgtaaaagcgttcctatttctccacatcctctccagcatctgttatttcctgaccttttaatgatcaccattctaactggcatgagatggtatctcattgtggttttgatttgcatttctctaatgaccagtgatgatgagctttttttcgtatgttttttggtcacataaatttcttattttgagaagtgtctgttcatgtgctttgcccactttttgatgggcttgtttggtttttttccttgtaaatttgtttaagtttcttgtagattctggatattagccttctgtcagatggatagattaaagcttgcaagctgaaactcaacaacttatgtaaacttctggagaaatcacagcaacttacatataaacaacccttgtgcctgctgatgtgtggactacagaaaaggtacacatgaacactgtattcagactgcaatttagagaaatgtgtcagattaccactgcaattggaagatgcttcagaaactctagaaaacctagtctatagactgctccagacattacaggtgagccaagatacaactgaaagggttagagtggtgtttgctaaacgaattgctctaattgaagcagcagttgtgtgactttaataaggttccaggattatactgtccctttgttgctgtgacttccctttgcccttttctgatttgtctttatcccttttccatgggacatgacttcttaagaatgagccttcctagtgatgcaggatcagatgaaacttacagtcacaaagtcatgtcttctacaatgttttgtctgaaagcttttgaagaattggggggccagctgtgctggcacaggcctgtaatcccagcacgttgagagtccaaggcaggaggatcacttgaaaccaggagtttaagaccagcctgagcaacaaagggagaccatgtctctgcaaaacataaaataaatcaaattagccaggtgcagttgtgcatgcttctagtctcagatacttgggaggctaaggcgggaggaccgcttcagcccaggagttcaaggctgtagtgagtacactccagtctgggtgacagagcaaggttgtgtctctaaaagaaaaaaaaaaaaagaaaagaaaaagaaaaagaacggggtaaacaggaaagccaaaaatcttgggcatctccagatgattgcctgaacgaattgttttttcttggcttcaaaacctttcaagatgtatatatctttgtaaaagaaagacatgccaattgtaactttaagtgagcaatcaaaatctagctcctaaaactgaagtattttaactctcattctgataatatttattttctgaggcacagaagaaagacaagattagattaattgtttttctgcccactccatctcttccgacctgccttctcccctttaatcaaatgtataaatactaagcctcctgaaatctcttcagagaaaacacaagccacagagattttttgcaactcatgttttcccagggttcactctcaagctctggctcaataaaactcaattggtcaagacccttgcctcagtcagtctttctggatatccaccatgagtcctgcaaagcccttcagtaatctattgcctgcctaggtgatgtgtacccaggtgagtcaggtcttcatgagtcaaacactcgtcttccttttctgtctttcccaaccctaccactcagtgctgtgtgctctgatctgaccccagctcccaggttgtttgtattggtctaagaaagcaagaccaggaggggcaggttgagaaggaagtaagaggccaacagccatggaaagtggcacgtggggctgtcattcctcaaaaccacataccctgggtgcattttgtgaatttttctggattcagaatcttttccctgtgtgtctatctagaaaatcaccctcctcctactttcctctcattacactttctgtttctggtgcaatcgtttatgtccagagaatggccatgcaaatagttgacaatagaataaaaaatgactttttgtgagatttggaacctggcctttcttttttccaaaagagattgaggtttctaaaagctagcttttatgcagggctgtgcagttgtgagtgtagttttagggaacaggtgcataagtgaagggtgagacagaaaacaaaatgctggctgtttgtcaaatcctgaaaataatttttgaaggtggatgtcattcaggagaccttgtaaatcttagagtgtcctcttaccagatgaagtggaggatgaggttgaattatggagttaggtgacagtgggtacatacttctctgcctcagtttttttttttaatctgtaaaaatggggatggaggcacttgggattttttgtgaggagtgtagttacctggaaagctcttacgatagtgcctcgtgcatagtgagtgctgcattagtgtgagctattataattatgggaatagacaaaggtgccaccctggccatccagagtggggaggtattttccagtcagggtccaggcaggccagctggagatgaagctgattagtggggaagcttaacttccaggagtggaagaatttaggaggagtaaacagaatgcacaacattctgtaaacatgcctttacccaacagtaggaatactcagagtgggtgtgtcttccgtggcaatcattatctcctgggaatctaagaatgtgtcctagagtcaaatggctttgatgtaagccaaacccagaaatggacttcagggctgcctggcacatagcattcattcatcttgaaaaaggaaagcattcatcttgctaaaggaatcccctcttctggcccaggccattatttttgtttttgtactatcctaatttttaagatgtaaggagaaagaccgaagaataaaataatgaggtacatgtatgaaataacagggtagaattgagactggtacgtgtaagttaagagaaattgtgtataaattttgtgtgaacagaaaaaggatttcttgttgcaaacagacctctccatataaataatacccattgccttgagtggatagcagacggcatcacaagaatattccagcagagtcatgagagaatgggtagtgtggcttctttaattggcaggttagactgagtaagttactgaagagaaaggagttgaaggagaagatgggtgagggcaagaaaaatgggaaggtgaaaggaaaggactgaaaggaatgtttaccaagggctcatcaggtaccaggctctgtgactaatgtctcacacatgttaatttactcttccactgtcattttctgatgcagtaagagtcagccttacactgcagaagaggaaagaggctgagggaggtcaaatgagtggcccagggtcatccagccacttcatagcagagctagtgtgtttcactgtggtttgtgcagacagaaaagtgagacatggaaggaaggcaaaacatttttgctgtgggtgatgtttatgaaagtgacctgtatgaggcagaataatggcctcttaaaaatgtccacatccgggccaggcgcggtggctcacgcctgtaatcccagcactttgggaggctgagaagggcagatcacgaggtcaccagttcgagatcagcctgaccaacatggtgaaaccccgtttctactaaaatgcaaaaactagctgggcgtggtgtcgggtgcctgtaatgccagctacttgggaggctgaggcaggagaatcattgaacctgcgaggctgagattgtagcgagccaagattgtgccactgcactccagctggggcaacatgagtgaaactctgtctcaaaaaaaaaaaaaatccacatcctaactgttggaacacatgcctttacttttcttggcaaaaacactgttcaaaggtgatgaagttgagtatcttgagatggaaaccttattctggcttatctgtgtggctcccagtgtcatcataagggtcctcttagtgaaagagaaaggcaggagggtcagggtgagaatgatgcagcctgagagactccactggccattgcttgctgtgaacatgtgtgataagacaaaattacaacgaatttagtaatagatgtaattggcttttatttgtgatttatgatttgaggcagctctccctctacagatgcctcagcatcccaagtagctgggactatattgctggatctggccagcagcctgcaatgcaacagggctctttctttgttcccaggcagatcggcaggttgagaaataaaagacacaaacaagatagtgaaagctgggtccaggggggtcaccgccttctgatcctgcgatgctgccaatgcactggatataccagcatttattattaagtttagtgagagtgttggtaggttagtgagggatttagggtcatttatatgctctctataagggtcacattccattcccagagctatggacatctgcttttctgggataggaatcttggttatgtgaaacctccctgactgcatgtccgttcataggctctctgcagggggaagcacatcacgtgctgttggctcattctggcagtccaaccttgcatttgtcttttcacaatcctgcatgcaattttgtgtttacaataatcaggtgcatttcatcttttattccatagcaatagtttcagggggtctccctacatctcccccttttctctgatttcaatgaaccatagcaatcatagcttggcactgatcacgattggattgaagaatattttttccaattttacacatgaacagtaaaccaatagcacaaattatacacagaacaaaattaatgatagtggatcctcccaaagattttacctattgaatggggttgagattagataacccctcagagatactgtctaaaacttcagcactgggtaaagcagttaagtgtgcttgagaggcttcaaaaatctgttctttcagcttgcttatgtctaaacttaatttatattcacttccttgtaaatgggattttactgattcccaattgtgaaaagactcattatattggaacagagttatacaaaaatcagaagtattccaatcacgttgcatttgtaatctatgttctaaactcataattctgtctcccatccatataacagaagcacatcccatgctgtaggcacattctggcagcccaacctggcattgtctttacacaatcctgcatgcaattttgtgtttacaataatcaggagcatttcatcttttattccatagtgatagtttcagggggtctccctacaggactacaggtgcacgccaccatgcccggctaatttttgtatttttagtagagacagggtttcactatattgaccaggctggtctcgaactcctgaccttgtgatctgcctgccttggcctcccaaagtgctgggattacagatgtaagccactgcgcccagcccataaatcaaacatttctttgagtttttgtaattccagcccaagagaaaccatttgatatttgaagaatggctgcacacaaacatttgcacacaaataaaaacatctgtagattgcaccacacgagggagaataccagtatgactatcaggaggaaaatatcaagagtttgaaatatgcaccttaggcaagatgcaaaccaactacaataggatagatcaaagaagaagccagaagagtctagtcattttaaccaggcagcacatttattgatttttacaactgagtctctataacaccggatgtatttatctatgtgcaacaagaagggccagaaactgcacaggctcccaaatgttcagctggtagagagcaattctattatctagcattgcatgtctatgttaaattaaaacagggagtgagaatagggaagtatagaagtggaagcctaaaaaaaactccatatatttgaggaaaaagttgtgttacagatgcagctaacgtcagcctttgggtggattaaaggatctcttggtatgtaaaaatgtgtgggccaggtgcggtggctcaggcctgtaatcccagtactttgagaggctgaggcgtacggatcacctgaggtcgggagtttgagaccagcctgaccaacatgaagacaccctgtctctactgaaaatacaaaattagctgggcgtgttggtgcatgcctgtaatcccagtactcgggaggctgaagcaggagaatcacttgaacacaggaggcggaggttgcggtgagccaagattgtgccattgcactccagcatgggcaacaagagcgaaactccatcttataaaaaaaaaaaaaagtgtggttgacatgatatatctgacactgttaacttactctcagaggctacttcttgtgaaatcctaagtacagcattattctgggaagcaaaggagacaagcattagcaaggacaaattcagagaggtaagagtctcatcatgagtgataatcttgttctgacatcttgagaaaagctgtccgcagtataaagtcatcaacttgttgtcatggtttgcagtttgagtgtctctaagttatggtgttgaacatttcgtgagctcttagtggcccacacctcagacatgagggttttcccatgaagtttacattgaattgtccacctccaacttatatggcttcaggaacagagccgctcttgttcttaatgatttcattggagaaaattgaattggaagaactaaaagaattcagggtccagtccagtctaccagtggattataaatactcagagataatgaacagtggttcaatctggtaacaggtgtactacagtttttcttttcaacatagtttttctgtctataggagtctctatttttaccaaagataattccagtaggatgaatttgtttgcaaaataggttgagtctcaccgaacttgcccagattttttagctaagtgcggaaagagtagcaatggacaatagaggctctttttaaacttctctttgctagaagtttttaataagaatctcagattaaacttccaaaaacctcttgaaactaggaagccaaaccaaggcccacttcagactttgcctgcattccctatgggtttattctatatatattctcaaatataacatcgcagtcaaagccttggtaatataaccaatgttttcaaatgtgtcctgttataaagagagcagatccttactgaacttgtgcagataactttattaccataaacatatgaatactcatgaatagtttcccaattctggggcactcagatagagagcaaaagcaaatgtttcaatttttgtttacaaaagtatactttaccaattgctcaagaaaaaaagttcataaatctggagaataaaacattcaaagaatcagcacattttcaaatagaaaattatgaaaacattatgcttttgattatttagtccaataacatggagtttttttcttctttgtctagaatttcatgaaggtatcagcctgttcattaaaattttgaaagttcttagtccagtggtatgatcttgaagttatcaggaacttgtattcaagagtccttgtcagagtcttttccataaatctccttgaagaaaaagcaattttggactgtaggtgattgtaagtagtttgaggaagaatcaaagcaactgtctgggaaagacaaagatttaaactgactatggttaaaaatctaatgagaatttattatggtaaagacacagctcacatagaaatccagttacttctgtggcatatgacactatggtaacatatttgatttccagaaatttcatataatttttagaatactcatttaaaaaaatttttttttttgaaatggagtctcactctgtcacccaggctggagtgcagtgatgcgatctcagttcactgcaagctctgcctcccgggttcatgccattctcctgcctcagcctcctgagtaactgggactacaggtgcctgccaccacgcccggcaaattttgtttttgcatttttagtagagacggggtttcaccgtgttagccaggatggtctcgatctcctgacatcgtgatgtgcccacctcggcctcccaaactgctgggattgcaggcgtgagccatcgcgcccagcgtagaatactcatattattaacattcccataaatattatttagagaaggtttagcctcacttatcctttatttgaaaatgttttctacacaatttaatatatcaaataaggtggcttttccattcagcttctgtttctcaagaggattactgagttcttggtgtagcccattcataaatagggccaaaaatgtatagtcttatgtatgttgaaaaaggtccttaggtaattccagtacttctagctgaaaatcattcatttagttttaagttctacctattacaacaagagttctccatccttgttacatgttagtagtgtcagggaagacttaaaaattaccaatgccttggtccctctccagacctttaaactggaactaatgggtggggcttgagcatccacttttaaaaatgctttccagtgattccaatgtgtagctctatttcccatcagatttctctgatttcttgtggcattcaattttttctattttggtatcatgattattttcaggtctcatttcctgtcttaggctttatgtctcctggggtagggaccttgccttcttcatttctgtatgttttttgaacacatgaactggtcatcaggaaaagatctcaaccacacataggttgtgttctgagtctcaggttcacatgttaatcctaaagtctccgttctccatgaggtcagatgttgcctgtgatgaagggtgtcgttaagtctgcagtgcagatggtggaggggatttcactctgtttttagacatagcattggaactaagaattttatgtctatatgggtgaaggggcagggatgtgtaggaagacagttctaattaggatgaaggaattatactaggaagtagaggtaaaggaagtgagaaggcttactaaatagaagaaatgtgaacttatcaaataggctagagtagacccctgcagattcttgattaagtgaattaactagattttagaaaggtaatgaggcagtcatatgcaaggaaggtttcaaagtctggccacaagaagtcaagcaatactttgagaagtggttgagctttatgggagtgtagagaattacactattgagagatgttaaaaataatgaagagggtttcaccatgtgaaattgtgtttctcatttgaatctgagaaacaaatgagcagaggctggagataattatgtctaaaagacagtggggtacagggagcataaaggccagggagaaagggaactgcaggaattagttctgagaagcaggagtttagtggaggaaggaggagatgcagtcccagatacaagcaaataagtcttttccctctcccaagcatggcagtcagccctgcaggaaccaggataagagaaaaggccatcatacctgccagtcttcctgaaatacagaaatgacttcacggctgctatattggattaaggagaggaagacgtcctattcctgaaggagctgtcatggaaagaaaagtaaagaaggaatgaaggtgatgttattttacatgggggagcctcaggaagaggcatgtagcatgaggtactctataattgtttcttcaagtactacattattcctcttgggaaattgatgggagatgattatattcttgcagttttttttttccctctcaccatgtttctaggatggtgatcagtcctctgtcaaatctctactgcactcagatattttggaaggctttcagacataagaaaggctgattgctattttctatgtcattagaacttaccaccttttcaccttttcatggttgcatctttttctcagtctctctgttgtggcagccatgaatgagactctgtcaggtctccatggcagggagctgattgacagaaggcccacgtccgtgcatttcacattcatcacctcctttgcacagaaagcttctttcccacaggctcccaggaagggcgtgaaagcaagcctagttctctgaggctctctttaactctaaagggtgactggttggaggactccccctcagccttgcaaaaactcttagaactgcattggtacctaaaacttctttctctttctttttcacaggaatcagctctgcatagtggtctgtgggttctcccatactgccttcatgtctgccccacattccctcacaggtgtcctccctgataaattatcttgtatgtctaatcccatcttgggtgcatctcagttggtaaaaactaacatatcaggcttgattctttgcacttagctttttttccttctctcccacaagtagtcagtaaccatgtcctagtgttttatgtgttacctctttttccatatatatggaaaaaggtaggtactgttgaggggcatttcctatgtgccaggccctgtgctaaatactttacctgtatctcatttaatccacacaataaccctgtcaggtagaaattatttccactttgctgatgaaaagacagaagcttatcatggtgtaaaaactttcctggtgtcatatggctagtgacaggtggatctgaaatttgattctaggactatttgacctcaaggctaatgatgatggtagtaatatagcagctgacattggctcctctgtgtggcatcttgtttcattgattgcattaaacatttaaaagaatggtatgaagaaagcactctcattgcaattttcaggtgaggaatcagaggttcagagaagttgagtcttgtgcaagaaatttataactgtaaactcttacattaaaaaagaagaaagatctcaggtcaacaacctactttaatacttcaggatatgaaagaagaacaaactaaacccaagcacagtgaatgagggaaataataaggattagagtggacataaataaaatggagaatggaaaaagaatagaggaaattaatgaaaccaaaagttgattcttcaaaataaaatcaacaaaattgacaaccattaactagattgactaagaaaaaaagagaaaagtttaaaattactcaaatcagaaatgaaaatggactctgagcatggtgggtcatgttttaatcctagcactttgggaggtcacagcagaaggatttcttgagaccaggtgtttggaccagcatgggtaacctggggagatgctgtctctacaaaaatataaaaaaccaattaactgggcatgttgacatgaacctgtagtcatagcatcttgggaggctgaagaaggagaattgcttgagcccaggaggttaaggctgcagtgagccataatcacaccactgtattccatcctggactggtctacatagtgagagcccgtccctctcttcaaaaaaaaaaaaaaagaaaaagaaagaaagaaaaatgaagcgattactaccaattctaataaaataatgattatgaaagtactataaataattttatgcaaataaattggataacctagatgaaatagacaaactcctagaaacacacaaaaatatgaatagaactataatcagtaataagattgaatcaataaaagcatttgatgaaattcaatattttttcataatgaaaacatcctaagaatagaaggaaaccacctcaacataaaggcaatatgtgaaaaacccaatgctagcatcatactcaacggagaaagactgaaagctttccctgtatgagcaggaacaagacaaggatgcctgcttttgacacttttattcaacatagtattgaaaggtctagtcagaaaaattaggcaagaattgaaaaaaagacattcaaattggaaggaaggagtaaaattctttctgtttacagataacttgaacttatatgtagaaaatcctaaaggtggaacaaaccaattaaaattaataaattcagtaatgttgcacaatacaaaatcaacattcaaacatcagttgtatttcaatacactaaacatgaacaatctgaagggaaattaagaaaaataatttcaatttatattaacatcaaaaagaataaaatatttaggaataagtttaaccaaagaggtgaaataattatacctgaaatctacaaaatattgctgaaagaaatgaaagaagacatcaataaattgaaagacattttgtgttcatgaattggaagactcaatattgttaggaggacagtgctgcccaaagtgagctgcagattcaataaaattcctgtcagaatctcagtgacatttttgcagaaaaagacaaatctgtcctaaaatttatattgcatctcatgactctaaatagacacatagctttgaagaggaagaatgaagctggaggactcacacttcctgatttcagcatttactacaaagccctagtaatcaatacagtgtggtactggcataaaggaggacatagaaattaatgaaatatcatagcccagaaagaaatgcttgcatatatggccaaatgattttcatggagtgttccaagatcattcaatggggaacggacagtgttctcaccaaatgatattgggaaagctggatatccaagggcaagagagtggaacctttacctaacaccatgcataaaaattaacccacaatagatcaaagatctaaatgtaagagtaaaaactacagaactcttagaagaaaagcttcatgatactggatttcacaatgatttcttggttgtaacaacaaaagcataggcaacaaataaaatggattaattggacttcacaaaaatcaaaaccttttatatatcaaagaacattatcaagaaagtaaaaaggcaacctatgaaatgataaaaatatttgcaaattatatgtgtgataagaaattaatttccagaatacatgaaaagctacaagtcaacaacagcaaacatccaaaaacccaattaaaaaatgaacaaaggattaaaatggagttttctccaaggaagatatacaaatatccaataagcccatgcaaagttcctcagcatcacgaatacttagagatatgcaaatcaaaaccacaatgttacaccacctcacacactttaggatggctttgataaacaacaaaaatgacagcaacacaaaacaacaggtgttttcaagtagatggaaaaattggagctctagtgcattgctgatgggaatgggaaatgttatagccactgtaaaaagtggtgtggctgtttctcaaaaaattaaacaataacttaccatttgatccagcaattccacttctggacaaactccccatagaaatgaaaaaaaattgaacaaatatttgtacactgatgttcagagaagcattactcacactagcgaaaaaatggaaacaactgaaaagtccattgaaagataagtgggtaggcaaatgaggtgtatctacaattaaaatgttattcaaccttaacaaggaataaaattccaatacatcgtgcaaaatggatgaaccttaaagatattatgctaactgaaataaaccagacacaaaaggataattatcatataattccatttataaaagatagttagaatagccagttacatagagacagaatgtagaatggtgtgtgctaagggttatggggagaaggagtgagttactgtttattgggtacagaggtttaatatggtaagaggaaaaagttctggaaatggatagtgtgatggttacacaacactaaattgcacacatagaaatagttaatggtaagtcttatattagatatatataaagtgtctggtagtcttaccctctctataattacacactttttggcactgcccctttcctgccatgcagagccccaggggtgaatctctctatttctccagctctgcatcagtcactatcctccgtgctgtgtcccacatgctgtgcccacaacctcatacaaccggtgacttcagagccaggacgcaacgcaggagtcttccctgaggctccctctcttcttatttccctgcagcctggcccgggggaggcttggcttcaactggcagctcgatttagccaaattcaggacaggccaccaggactctttctccacacatgctggtcccaccccaggttgagtgaggcaggcccagtcaccagagaagcatggagcagagcaggaagcagagtctgagctgctcctccctcacccaaggggcttcctcgtctcatttgggggaaaagtgtgagcttgtttcagagcctcagatgttccttgtagctcatggaataggtacaaggaaacaaagacatggcagaaggggatgtgttggtgacatcgagaagcaacttgatcttgaggactctccttctcatccctctgtgaagcctcctctaccacatagggctcagggctgataaagccccctccctaactttcttaggccagacacaaggtcagccatgagaaaacagaaaaacaaggagaagagagtttgtagagacaaattggaagggttcaggaggagaatttgggatttgcttgtgcccatgggacacaggctgggaataaaaatgttttcctaactcttctctgaaagccaggtagactccacctaaaaccctattgccaaggatgctgggatccacttaccagagacttcgactgtcatggatttggagctttccttgccagtagctgagttacgaacagagcaagtatagagccctctatgctttgtagtaatttgggggatagagagcttttgtcctgattgctgaaacttcccattaattgtccaaaaatactctgccggtgggttagattccgcgaagcaggacaagtagaggttttctcctgaacggtaataggtgaatgaagggtaaatgctggggaggtctggaccatctggagcaaagagaatgaagccacaggtgatgtcatccaagggaaggggatgctcctggtctcttaaagggacacagtgaccctctgagccaagacacaccctcaagtcccagccgaacccccactatattcactgagccaaagcctgaggtattcacctgtttctcccatcacaagctattgacacaaagtctcccatgacaagagcgccccctccccttatattcctggttaaggctgtgcctacctaggttttccaagggcagggagtcatggccagctcagatgtccagaaataaaggtgtctatacttggaccggagaaagactgagaggactggcttgtggtcatttagatttaagctggtgtcctggcccacagaggaacaaaagatactcacagaggacattcagggtgactgggtcactgcgcatgccaccatctcggtcccgtatttcacattcatagggtcctgtttcatttctcgtgacactgggtagaatgaggatcctgttttcaatgggtcgctttaccctgggactgaccgggaggctctgaccatttagccaccaaatgtaggtgtagttctcactcttaggttcacaggtgaaggctaagacatccttattctccctgggttttgagttgttgatggtgatgtagggcttgggcagcttcactgtgtggataacagagagaagattgtcctgtgtggcacctttgattcctccacaggcatccttcaatcagagttggcatctcccacctgtcaacccaccagagtccttgaaagccagtagctgatgcatgtgtcacaagatagatgcatgatgatctaagggctcaaagactgtgaggccacctgctctgttttagggaagcacagactttctcaagtgtcaattgagcagcagtgttgggtcatgaacagacacatcagtgggagtcacagcccctggtacccctcccagtccctccataatcagttgactggctggctcaccctgggttccttacctggaatgtgcaactgctgggccccttccaaattccatcctactttgtccccctatatgtgatttctctgcagctcccatttccaaggacattctagagatgagtaataatgggacttcccattgtcctgaaaccctgaagatactgagcagtctggcctgggactggatgtttcagcagaaataacacaggagagaccagagtcaagcctggaggtcagttcagtcatcagccagtggaggcagaaagtggggcagtgttttgcaggtgtttcatgatgacttacttgaaccagtgacctctaaagatagagcagagtgcaaggaatgatctagaaggagtcaaggggacaggcaagagctggtggctttggagcagaaccatgttccctgtcctgggttctttaagtttcctctccttctgcagagggcaggtgaggaccatgtggatctttccagaaatacatgtggatgtttgcaaatgcagaactgattggtagaaagggtgggaatgaactgctggaaatctggtcctcatggaccatgtgtgtttgatggatatgagacaaatttgaagagaagttttgggaatattttctttcactggacattctactctctgattccatggattcgactactctagggacctcatgtaagtggattccagagtgaatatgagaagagactgctgtttgccaggagctgggagtggggagaatcagaagttgttcatgggtgtgcagtttcagttatgcaaggtggggaggttatagagattggctgtcgagcttgatacctatagttcacacagattgagtatttcttatgcataagacttaggacaaaaagtgttttggatttctgacattttttgattctgaaatatttgtcatatacttactggtttagcatcccaaatctgaaagattcaaaatctaaaatgctccagtgagcatttcttttcagcatcagattagtgggcaaaagtgggaggtgataagccaaatatattcctgcccttttttttttttatctcaccacgtttctaccatggtgattagtttttggtcaattccacactggccattctgcactcatatatttttgaaggcttttggatgtgagaaaggctgattgctgtcttctatgtcatgagaactttaaacattttcatggttgcatctttttctcagtgtttgtgttgtggcagtcattaataagagcctgtcaggtcagatttaagacagagttttctaattctgcaaaaaatgttactgggattctggtaggagttgcactgtatctgcaacttgctttgggtagtattgtctttctaacagtattgattcttccaatccttgaaaatgaaatgtctttccatatattgatatcatctttaatttctttcagcaatgttttgtagttttcagggtataatcatttgacctttttggttaaacttattccaaaatattttattccttctgatgttaacgtgaattgaaattcttttctcaatttcctttcagattgttcattgttagtgtatagcctaaagaatgatctagaaagagtgaaggggaaaggcaaaagctggtggttttggagcagaaacatactccctgtgctgggtttttgattttccctctccctttgcagagggcaggtggctcttccctgatagctagatagacttcactggaaaacatattgccaatgctccagggatccacttaccagggactatgatcctcttgattatgagatttgttccatcagtggctgagttatggatgaaacagacatagatccctctatgttttggtgatttggggaataaagcacacttgtgctgattgctggaacttcccatcaatcagccaagaatgctctgccagtgggtgagagtctgtgaggcaggagagattggggacttcccctgtatggtaataggtgtatgaggaagaaatggtgggggcatccaggccatctggagcaaagagaataaagtcacaggtgacattgtcagagggaagggaaaatcctggtctgtggaagggccacagtgaccctgtgagccaagtcgcaacactgaagtcccagccaaatccccgctgtgttcactgatctggagcctgagacattcacctgtttctcccatcacaagctgtggaacctgagtctcccatgacaggagcagcctcttttctcctattgtggatcaagcctaggcctactctgttttgcctggggcagaaagtcatggccagctttgatgtccaggggtaaaggtctctgtacttggacctgagagggactgagaggcctggcctctggccatgtgtatttgggatggcagcctggctcacagaggaacagaggatactcacggaggagattcagggtgactgggtcactgtggctggcactcactgggttccgtatttcacattcatagggtcctgcaatatactttgtgacaccaaatataaagagggtcctgttggttttggacagctgcaacctgtgagtcatagggaggctctgaccattcatccaccacaggtagcttgtgtctgaagccgcaggatcacaggttaagatcacagcctccatggcctccctggggtttaagttgctactggagatggagggcttgggagtttccactttgcagaaaacagagagaagattgccctgtgtggcacctttgattcctccaaaggcacttttcaatcagagttggcatttcccacctgtcagcccacccaagtccttaaaagcccatggcaggtgtgtgtgttacaagacagatgcatggcaatctgagagctcagagattgtgaggctgcctgctttatgtgggagaagtacaggctttctcaagtgtgaattgagcagcagcattgggtcatggaaagacacaggaccagcagtcacagacccgatgcctctctgagttcctccgactaaaactgcctgcctgacccaccttgtggtcctcacttggagtatgcagtgctggaatcttcttagtttcagtcttactttgtcccccgaggtatgttttctctgcagcttcccttgccaaggacatcctagagatggatgatggaacttcccattgtccttaaaccctttgggtactggaaagcctggcctgggactgggtacttcagcataaataacacaggggagaccagagtcaagcctggaggtcagttcagtcatcaggcagtggagccacaaggtggcgcagttttcccaggtgtctcatagtgactgacttgagccagtgacttctaaagatagagcagagtccaaggaatgacctacaaagagtgaaggggacaggcaagagctgatagctttggaccaagaccattgttccctgttctgggtccatgatgcttccttccccttgtagagggcaggtgaggaccatgtggatcttctagaaatacatgtggatgtttgcaaatgcagcactgactgttggaaagggtaatcatgaactgatgatggaagtctggccctcatggaccatatgtgtttggtggatattagaccaatatttgggaagaagtcttgcagatactttctctcattagacattctactctctgattctgagtttgactactctatgtacctcatatcagtggattccagagtgaatcagagagtagaatagtagtttgcaggagctgggatcaggggaatagggtgttgttccatgggtgtgcggtttcagttatgcaggatgaggaggttctagagatctcctgtgcagcctcgtgcctatacttcatgcagatacagtgctccttatgcagaaagcttaaaacaaagtgttttggatttctaatttttttaattttggaatatttgcagtacatgtactggtttagcatcccaaatctgaaaaatttaaaatccacaatgcgccagtgagcacttctttttaacatcacatcagtggtcagaagggttgagttttggagcatttcagattgtggatttctggatttccgatgctcaattcgtaatactgtaattttcccataaaaagttgtcaggagtttagacctcatgttatgttctgactctagtaacaaaaaaaatttggaggaaacattaaaatgttttcataagtggaaatttttactgatgatccaaacatctaagatcaattgctggtagtagtatttctcttgagaccaaaataaggtttaggtgtgccgtgaattccagcaggatcacattatgctcaaagaaagacgccaaaggtgatttgaaattagcagctccttaagtagagagtcccgttaaaaggacagaactggtcagtgcgtcaattacataaagggaggaaggatgccaaattaaaagaagtgatgtgtgttatgttagtaaatatagaaagaactccctgcttctaatttctgtgcagagttaggaaaaatggggaggaccccaaaacaggtatgtgaaatgctttcttcattttctcttaagctcacgaaacaccactaaagtttaagtttgtgtgaattaggaagaatctaagtgagatgccaatggctcgtgtgtctccccacacgtagaactccaacttatgaaaatggcatcatcatgaggaaacagttttatgtggcacaggcagtaaaaccattagatagcacacacctggccacctccaactggtccccaaaaccaccaatattcacattacgtgtatctgacagcctttgcagttgtccacaactacaaaatttaaaaattgctattgccaaaacaaaatattaaatgtgaagttgaatgtgttgttccactttttttcccccactcttattgaactttcctttttcagttttggaagtttctattgacacatcctcaagccagagattctttccccagctgtgtgcagtctaccagtaagcatcaaaagcattcttcatttctctaacagcatttttttttctgagacagagtctctctctttcacccaggctggagtgcagtggcatgatctcagctcactgcaagctccacctcctgggctcacggcattctcctggctcagcctaccaagtagctgggactacaggcatccgccaccacgcccagctaattttttgtatttttagtagagacggagtttcaacatgttagccaggatggtctccatcttctgaccttgtgcccgcctcggcctcccaaagtcctgggattataggcatgagccactgtgcccagccatctctgagggattttaatgagttgttgacttttgagtttgttcaactttttacttactgttagaaccgagtgacaaatttcaagcttgttatatgcctgacaggaagccagaagtctctaagaagtgacaggagaatgtgagctccatagtagtttgaggatggagtcacgagtgaaacagttgaaatgagtccatgggcattggggactgcaggcctgtccagcctctgacaccctggtgagtcagtccatacattacaacagtgacagcaaagtagcatgtctgactccatctggcatctagtctctggctggctatcctcactcattcctgggcataggccaggctaaccttgggaggaatttaatttatggtttgactttgaagcaagaatcacaaaacttcctccatgaaactaacaaccttactttgcccagggatggcctttgtcaaactagtgaaagaccatgagattaagattataggagggaactgaattctgctaaaatgttggcacagtttctataattcctgactgctgcaatgttgtttggccagagtttacaaaatttgtaactaattgctcctatagataacatcactattgtagaacatgagattggtcttttgagatgtttctcattcttttgcattctggcaaccggctgacctcattcatacctatgactaatggctcagccagtcatgtggtccctacctggaggcagattcgagcacaaacagatcatttccctctgcccacatgattccatcaccaaataatcagcagtactcattttttagtcctgtgcccctgaaactatccttgaaaatctctaacccctgatccactggggaggctgatttgagtaataataaacctctgtcctcctgtttggcagacttggagtcgttaaaatctttcttgactagaaaccaacatttcaataattttttttttttttttttgtgcaggaggccagaagatcttgcctggcaattatgaatggatggaggaactgcctatccctgtcccattgtcttgtccacaggtcagcctcacaaagggaaagagccctggatgggaatacagtggaagctcattctcttagtgacctgggaacattggctcgagatgaagcctggcaggagtggcaactccaggtgatttctgcacctttcctatttcctgggaggtgggccaggccacagtgttagcgggaagggaacagaacagccagcctagttagagggagtgtctggggaaggcctaggggtgggggaagaagctgtgcaggacagggcttgccagtcagaatgaagtgggaggaagatgagggacacagagaagcagaggcagagacaccatggcagtgagcagtgagggagacactgacttcagagaccccagggaccagctgcccccagttccacagtccaggacaaaggagccctgagaatcctctggtggccaaagagcttcagagttgcatgaggtggggtggctttaggggcaagaggtagtggggggatgaaacatggatgtcagcctctgaaggacaagggacaggtgtggctagaacctcctaggattctgcatccaacatccagtctctaaagaggttttggatcattcatttcttcattccattccttcatttgttatgtgagagctcctgagtgtgtgtctctcgctgggcctgtgctggagcagggtctgagtggggaaagaaaacaaagtcctctccttgatcctttcatgacagtgacatgggcactttgggaaacacaggatttcaggttcagtgatgggggttaagatctgagggggaggcctggacatattttttgcactgactctgacggttgaggcagttgatttagttctggagtgcagactaatcagctgaccatttgctctcactcctctgaggtttagaagcctaagaagagaggatttgagccaataaatgactatggggtccttggaacccagtaagccctcacttctggtggagaagatgggcctgtggctgcagacagacctcatgtgaccctgatctccccctttgggtttgtgtgactctggttcagtgactgtgccttcctgtgcctcagttttctctcaatcaaataagctaagtggcaaatggactgtggattttcatgctactgtgaataaatgttaaatgattcagtcacctgacctaatgcttggcacagtggaggtttcacacaaacagcatttattattaatttgcttccatgagaaagcacctttacgtcagatccctgtggacaagctgctaccaggtacatcttctcccttctgtttatgcttctggggacattagactttctatggactgtcctaagcctcctaaagcagttggctgatgtcctacaaagcttgtctttctgtcctctccactctgagtgtcaggtgaagaaagctctgtctttgcccagatgaggctctgagggctgagccctggctggtgagcagctccaggagacacagtcctcagacagctggtaaattcttggtcccagtaaggcctgcccaataagccacaacccagcactggcacaggctcctcagcttaactggagcaaggatttagggacagaggtctggggttgaggcttctagggctgagcttctctgagggtctcagggggcccctcaggccaaagccctactcagttctccagggtctttctcagggtcaaatttatgaagagggcatgaggtgcttggctgagactgatctcctcctgctgagtccccccatcagactgtccttcctctgcagcgagtgtctgcagggtctggatgcgggaaaggaattctgatctgttgaaatttgtctcctctgtgtgtgtcctgcactaaatgcccaaaccgcagcatgggacataatgcagagagggacacaggcacagtgcaggcctgacaatcctgtgtgtgtgaagtagaaatgacccctgtcccccaacacccagggatcatgtggaatcactcacggtataagttgaaggtgaaatatccagttactcctctagtcctatcacctcgctttatgatgtgtaaggtgtaggatcctgcgtcttcccgggtgacattctggatcagcagggatgcattggaatatactgtttctcgtccagtgtatgcaggcccatatatatttatttgaccgtctactacatatgatgtaatgtaatggtagaggtccatcagttgtcctttgtaccagatgtagccagcaagattctgaggcaaattgtggacaagtagaagaacatccttcccctcggaaactttgggtggcagggcttcaatcgtgacttgagcagtgataggcaggttccagaagtttaaaagtgatgctaggaggtggagaaagcaccagtcaatattgagacctgtgtattggggtgaaaagatggagccctgggtcctgagaaggtctcttcaatcctcagccttgaagacacacacacacacaaacacacacacacacaaaaggtgcatgttagtttgtgtgtgtgtatgtgtgtgtgtcctactgtcctactaggtcaaggtcagcagcgtgacccctattccttcaacacttctgaccttggcatttttgtatggaatcctcttccccaggggtccacacggcacccccccccccccacactgccctcaggtcctgctcacatcagggcatccttagacttctttcctgacacgtccttcagagaccctgggtcttccctttctgacctttccctgctctgctccctccagggttcttgtcaacacctgacctcacattctagatctctttgcatgtctgtcttcctccccatgacagcgtgagctctgtgaggacagggacttttgtgatcttggttgcaccccagtgcctggaacaggctgcagactcctgcagatgtgagagttctcagggccctccacacccttggtgttttattttcccccaattgttgaggattttgctgaggacagtgtttcatgtcctgcttatacttttattagaagtgtcatctgatatagttattattatcatttttcaaaatgtcgtggccctcttaccaattccggttcaatatgactttccagttttgacctctgtccctctctggtgtattttaccctatccaggctccaacagagacttctttccttttttttcttttttcttttttttctttttatttttttgagacagagtctcgtactgtcacccaggctggcgtgcagtggtgctatctcggctcgctgcaacttctgcctcccgggttcatgtgattttcctgcctcagcctccagagtagctaggattccaagagcacaccaccatacctggttaattttttgtatttttagtagagacagggcttcactgtgttggcaggactgaccttgaactcctgatctcataatccacccacctcatcctcccaaagtgctggcttcttttattttttagaaccccatcctctccaggagacccaatccagtcactcttcttcctcctcctgtcctctcccaggaagttctctcctcacctgtgagcaggagccccttccaggtgatgtgctgtgtgcagggaggggctgagaggggccccatggtctctgcgcctgcgtgttctcctctgtggagctgagcctaggatccagaaacttcctgagcacggctgtaggctgtgctgtccttcctccttctgtgctgagcctctctccagggcaggagcacttctcaggctcatgggtggggtcaggcccaggacacctctctgtcccctcctctctcagtcctgcctccttgtccctccttctgtttttccttttgtctgtgtttcaggtccctgggaattgtggaggcctctgcatttttcagcagtgattctttcaccaaacctcaaccacactttgtgcagacacacacacacagaagagacacacacagacccacacagtcacacacataccccgcaggttgggcaagcagagtcctgggcctcagcctcctgctgtccccatggctctgggtcgggatgcacattcacgccctttgccctctttcatccccatctggctctccccttcagtgcaggaggctgaagctgcaacgggtccctgtcacagtgacaccccattgtgctgtgggtgagctgtgtgttgcctggtgagagggacccttcctttctctaatcgtgtctagcttggctgcagcttccaaggatggaccttcaggacctgggtgtcccagaggaaactgtccttcctggaggtgtgcagggtgaatctctcatgcctcttgggaggagaggcctgtgctggttgctcagtgggggctgtgagtcccagagtcaagaggacagttcttcatcactctatggctccctggggtctggcagctgagctggagctcagggtttctcatgttctccctgaccatctttgatgtcctctcttctctgcccagctgactgtcctggggtcaccacaccttccccgttgtggtgcaggaggaagtggggagttacccaggaaccccgcgggacatggctcgttgagacgcaggagggggagcctgggacagagcaggggttcagagctggagagattcatcccgacttactccgtggccatgatgggctcagccctccatgtgctgacatacccaggggtctgtcctgagggttttgacctggccaagctgctctctgtagaggaggaacaggcattggccagagatcctgtctggagggacgttgctcacacctgagagggcgggtgggggtgagttgtgttctgagagcaaagagcaataacacccctcatctccccgcaagcacacaagagaggtctgtcttcccaagggacagctggtggcaggtggccacatcccggatggtgcctgtgtgtgaccatcacacgctctctgcgccccctgggctgcagcaggcaggcaggacacagggtgcctggcttattcccggggaggctgtgggccctcaggcagccactgttctgtgtcaacactaggcttggcctgggatgccccagagaacaggacagatggagcaggggcgggcatttagggagcagtgacagaaagagttgatgaggatggagggaggtcacgaggggaaagagctcagcgtggcgtcgcgtgcaccagcgctgccctgggagatgcctttagctgggcccagggaaggagcaggtgtgtggggctggagctacctacagagggagtggtgttaggttggcggccgccaggtcagagaggagctgacagagtccatgtggggagcatggagggcgctgaggacttgggccgaattgaccctggtgagggtggacccttctgggctgtgggttctaatgagggacgttggcatcccctgggaaggctccaggctgggagggactctgtcgtcctctggtggacagggagggaagtgtgaacggcagcaatcccaggccaggctgcatgttttattccacatggatctgcacacttcacacgaggtcacacttacgttatgttacagctccttcaccttccagccccgtgagtcccagtctgtgtggctctacgttcactgttctccctctttcacaatcagatgtcccaaatgcagatttttgtcaccttctgtgagtttgtgtttgtgtgcagtaggcagcactgtgtataccctgggggcagtgatgtctggggctgagcactgcagttgggcttgggagcagaagagggagcagcaggatgggaagaccaatatcaggggggcagggacaagtcattttcattttctcactcccagggaccagaacccaggattctgactccagggcacagtaccacaccctgctggtgtccctggatgtcatgatgctcatagtgtcatgttgccttggcattcatttttataaggtgtaagtttatttgcctcaaatcagaggcagggcttggtcaccatggcagttttcaatactgtatctggttcaggtggctccagttggtgtccagagataaaatcttagaggcatctctgctgcttggtgtgctgggctcccgtctctccagctgctttccttaaactgataattctgacattcgccctcacatttaaagtgaccacctctcagtcacagcgtgagctcctggtcccagtgtttgctgcttgctttgaacacatccattaaagctccctgctggaaacctgtcagataacaccctggacttaataaagccattcgcttacaggtctcttctctcctccctgcctgggctcactgacctctgtgtctgtggtctccaggtgtgccaagtgctccccagtgtctgtaagtagtaaaaatcttacaatttcacattgtggttgtattgctgttgcctcacatgccatccagggcctgacattgaggctgccttatgggacctgtgctggctgagcccctgctggagctcttgttttggggcctctggttctgctggggacaggagcttccagctaacttgattgaaaactgatgcctttcattgaaaacactgggtcagatgatgtattcatgggcttcagctgccataacaaacaccttagcctgggtgaattaaataatagaaatctatttttcacagttctgtgaataatgtgctattttaaccactttaaaataaacaatcaagtgaaattaaccacatacacagtgttaaattaccatcaccagtatttttcctagaaaatttttatcattttaaactgaaactttgtatcttttaaacaataactccctgtatgttccaccctagactttgatcatctctactctgtctctatgaatttgcctattcttaatggttcatataaatggaattatacaatggtgttattttgtttctgacatatttcacttagcataatgtttccaaagtccatgcatgttccagcgggtgtcagagcttcattcctctttatggcagattaacattctgttgtatgtgtcaccatatttatttattcatgtgttgatgaacacttggattgttttcatattttatcttttgtgaataatgctgcaatcaacattcctatgcaagtacctgtttgagtccctggatttaattttttgggtatatacctaggaatggatgttgtttcaaatgagaattctatgattagctttttgaggaacaggaaaactgtttctcctagtggctgtacatttttatattctcaccagcaatatatgaggattcgaaattctacataatgctgctacttgttatttaacattgtaaaagaatggtagccagttttgtaggtgtgattggtgtctcattgtagctttgacgttgtattttcctaatgactaatgatgttgagtatcttttcatgtccttcttgactatttgtatatcttctttgaagaaatgtctatttgagtcttttgcccatttataaattggatggtttgtccttttgttattgagttgtagctagttcttgatattatctggacatgaaaactgcctatatgtggtttgcagatattttctctcattctgtgcctattaattattttcttgataatttcctttgatgtacaaaaggcttacatcttgataaagcccaatttatctttttttcttgtttctcatgcttttgtatcatatctaagaatccactgcacatttgagatcatcaatacttacgtctatgtttattttaagatgtttttatggttataggtcttatatttaactcagtgatcaattttttagagaatggtttgatatcgtgggaggtagaattatctaaattaactgttttgcatgtggttatctagttgtttctgcactatcatttgaaaggagaattgttcctccattaaattgtcttgatacctccttcaaagagtaattgaccataagtgtcagggtttatttctagactctcaattctatcccatttgtctttatgtctatcttttgccagcagcttctgttttaataattgtactactttgtcagttttcaaataagaaagttcaagtcctacaatttatttcggcaagattgttttggctattcagtggtcctttttgaaaggtgggaaggccagtgtttcacaattgggaaagccttttctgtcttcttcagggggaaatttgggagaaccttcaagaaacttattctaagtaggtaaactgtcaccactttatttgctgaagtgctatgttaaagtgtgcattgcctcttgtggaagaattgtgagaccctggaagcacttgcccatgtggtgagagacagtaaattccacgatgaggggggaagggaacattgttttaggacaccgtgttgttggggagttgtatacatctctacttatttatgtctctgtacagtgggtgtagggaccagccccacagggtcggtgggtttttctccacatgtacagagatgagagattgtagaaatgaagacacaagacaaagagataaaagaaaagacaattgggcccagggaaccactaccaccaagacgtggagaacggtagtggccacgaatgccaggctgcgctgatatttattgtatacaagacaaaggggcaggataaggagtgtgagccatctccaatgataggtgagaccacatgggtcacgtgtccactggacagggggcccttctctgtttggcagctgaggcagagagagagaggagaaagagcttacagcattatttctgcttattagagacttttagtactttcactaatttgctactgctaactaaacagcagagccagctgtacaggatggaacatgaaggcagactaggagtgtgaccactgaagcacagcatcacagggagacggttaggcctccggataactgtggttggacctcactaacatcaggccctccacaagagatggagaagtagagtcttctctaaactcccccggggaaagggagactccctttcccggtctgctaagtagtgggtgtttttccttgacactgagggtacctctagtccatggtccacttggcaacaggtgtcttcccagacgctggtattaccactagaccaggagccctctagtggccctgtctgggcataacagaaggctcgcaatcttgtcttctggtcacttctcactatgtctccccagctcctatctatttatgacctggcttttcctaggttataatcatagagcgaggattattataatattggaataaagagtaattgctaccaactaatgattaatgatattcctatataatcatatctaagatctatatctggtataactattctccttttatattttattatactggaaaagctcgtgccctcggtctcttgcctcggcacctgggtggcttgccgcccacaagtgggcatctccgttggacacagtaggttttgaaatccttgtttattctctggggtctgggtcttggcttacctgttagctgcagctgaaagaggtgtctgctaagtcaatgacacctgtggggagaagaaggattcagcagagtgaaagtagctgggactcagagaagccaggaaagtctgactcttagaaactgtgggtcagcagatgggtgtcctcagggataaatgggccatgccggtagccactgcagtgaactggaagaaggtaagggatgctgggtatcccatgttctctctcagctctgcagctgaagatttgggccctgggctagtacagccctgcagcaggggaagggtatacaggaatggctgcatatcaggaccaagtccatgtcatcttcttaggcattgttactgcagatggaggattctgttcagagacctggcctggacacatgggagggcccaccccattcttttaaaattattttaagagaacagtattagcaaatgtggtacatgttttattctgctagaatcagtattactgtcacgttttacactgtatctcttaggaaatggtgagagccatccacacaatgtgcatttaaaggagactctactataatttcagctttcctactctttatagaaaccatcttctctgcaaacacacaggcaatatctctgtgttcatttctattgggagccctgtatgcaagatggagagagccacatttcccctgagatgttacgtaaaagtttgaggttgagatgacatatctgacactctgttgttaccctcagaagctactacatgtgaaattctaatgactgcattatcctgccaagtgaaagaggcaggcatgagcaaggacggttaagaggggtgggagccttatcatgatggggagtcttgttctgacatctttggaaaaactgtccacagtgtgaagtcatcaacttgttatcctggtttacagtttgagtagctgttgttatggtgtcgaacattttggtgagttctgagtggctcacatgtcaggtacaagggttttcccatgaaatttacatcgagttgtccacctccagcttatagggcttctggaacagagtgggtcttgctcttcgtgattccatgggagaaaatggaattggaggaactagtagaattcagggtaatatccagtctacaggtggataataaaaacacagaaacaatgaacagagctgcaatctcataaccggtgtactacagtttttattttccacataatttttctctctatgggcatctctagttttaccaatgataatttcagtagaataagtttgtttgcaaaataggttgagtttcttcaaacgtggtctgattctttacataagtgcagcaagagtagcaatagaccatgtaggcgctcttttagaattttatttgctctaagtttttataaggactctcagattaaacttttacaaaacccttgagaataggaagccaaaccaaggctgacttcagactttgcctgcagttcatattggttcattctatctatattcttgaatataacatcccagtcaaagccttggtaatataaccaatgatttgaaatgtgtcctgttacaaagagagcagattgttactgtacttgtgcaaatatgtgtattaccataaacatatcaatactcatgaatagttgcccaattctggggcagtcaggtagagagcaaaagtaaatgtttcaattacggttcccagaagtatagtttattgaactgctacaagctatagatagattaaaagaaaaaaattccataaatctagaaaacaaaccatttaaagaatcagcaaattttcaaataaaaatcataaaaatattatcctcaatattgtcaattatttcaatgaaatcaatgtttctcctgcttggtctaggctgggaattttaagaagatatcagcctgtttgttaaagttttggaagttcttagacaaattgggagtgttcaggagtagaatttgggatttgcttgtgcccatgggacacaggctgggaataaaaatgttttcctcactcttccctgaatgccagatagactccacctaaatccctattgccaaggatgctgggatccacttaccagagactttgactgtgatggatttggagctttccttgccagtggctgagttacgaacagagcaagcatagagcccactatgctttgtagttatttgggggatagagagcttttgtcctgatagctgaaacttcccattaattgtccaagaatattgtgcccgtgggttagactcggcgaagcaggacaagtagaggttttctcctgaacggtaataggtgaatgaagggtaaatgctggggaggtctggaccatctggcgcaaagagaataaagccataggtgatgtcatccgagggaaggggatgttcctggtctcttaaagggacacagttaccctctaagccaagacacaccttcaagtcccagccaaactccctctatgttcactgagccgaagcctgaggtattcacctgtttctcccatcacaagttttaggccccaagtctcccatgacaagagcgtcccctccccttatattcttggttaaggctgtgcctacctaggttttcccagggcagggagtcatggccacctcggatgtccagaagtaaaggtgtctatacttggactggagagagactgagagacctggcctctggtggtttggatttaagctggtgtcctggcccacagaggaacaaaagatactcacagaggacattcagggtgactgggtcactgcggatgccaccatatcggtcccgtatttcacattgataaggtcctgtttcatttctcgtgacattgggtagaatgaggatcctgttttcaatgggtcgctttaccctgggactgacagggaggctctgaccatttagccaccaaatgtaggtgtagttcttactcttaggttcacaggtgaaggttaagacatccttattctctctggggtttaagttgttgattgtgatgtagggcttggacagctttgctgtgtggataacagagagaagattgtcctgtgtggcacctttgattcctccacaggcatacttcaatcagagttggcatctcccacctctcagcccacccgagtccttgaaagccaatagctggtgcttctgtcacaagatagatgcatgatgatctaagggctcaaagactgtgaggccacctgctctgttttagggaggcacagactttctcaagtgtcaattgagcagcagtgttgggtcatggacagacatatcagtgggagtcacagccccttgtacccctcccagtccctccctaatcagttaacttgctggctcaccttgggttccttacctggaatgtgcaactactgggccccttccaaattccatcctcctttgcccccctagatgagatttctctgcagcttccatttcaaggacattctagagatgagtaataatgggacttcccattgtcctgaaaccctgaagatactgagcagtctggcctgggactggatgtttcagcagaaataacacaggagagaccagagtcaagcctggaggtcagttcagtcatcagccagtggaggcagaaagtggggcagtgttttgcaggtgtttcatgatgacttacttgaaccagtgacctctaaagatagagcagagtgcaaggaatgatctagaaggagtcaaggggacaggcaagagctggtggctttggagcagaaccatgttccctgtcctgggttctttaagtttcctctccttctgcagagggcaggtgaggaccatgtggatctttccagaaatacatatggacatttgcaaaagcagaactgactggtggaaagtgtgggaatgaactgctggaaatctggtcctcatggaccatgtgtgtttgatggatatgagacaaatttggagagaagttttgcaaatattttctttcattggacattctactctctgattccctgggttcgactactctagggacctcatgtaagtggattccagagtgaatatgagaagagactgctgtttgccaggagctgggagtggggagaatcagaagttgttcatgggtgtgcagtttcagttatgcaaggtggggaggttctggagatctgctgtagagcttgatgcctataattcacacagattgagtattatgcataagacttagaacaaaaagtgttttggatttctgacatttttttattctgaaatatttgtcatatgcttactggtttagcatcccaaatctgaaagattcaaaatctaaaatgcttcagtgagcatttcttttcagcatcagattagtaggcaaaagtgggaggtgataagccaaagatattcttgccctttttttttctctcaccacgtttctagcttgatgattagtttttggtcaattccatactggccatgctgcactcatatattttttaaagctttgggatgtgagaaaggctgattgctattttctgtcgtcagaactttccacgttttcatggttgcctctttttctcagtgtttctgttgtggcagtcattaataagagcctgtcaggtcagatttaggacagagttttataattctgcaaaaaaatgttactgggattctggtaggggttgcattgaatctgcaactaactttgggtagtattgtctttctaacaatattgattcttccaatccatgaaaatgaaatgtctttccatatattgatatcgtctttaatttctttcagcaatgttttgtagttttcaggatataatcatttgacctttttgattaaacttactccaaaatattttattccttttgatgttaatgtgaattgaaattatttccttaatttcctttcagattgttcattgttagtgtatagtctaaagaatgacctagaaagagtgaaggggacaggcaaaagctggtggttttggagcagaaacatattccctgtgctgggtttttgattttccctctccctttgcagagggcaggtggcttttccctgatagctagatagacttcactggaaaacatattgccaatgctccagggatccacttaccaggcactatgatcctcttgattatgagatttgttccatcagtggctgagttatggatgaaacagacctaaacccctctatatgttttagtgatttgggggataaagcacacttgtgctgattgctggaacttcccatcaatcagccaagaatgctctgccagtgggtgagagtctgtgaggcaggagagattggggaattcccctgtatggtaataggtgtatgaggaagaaatggtgggggcatccaggccatctggagcaaagagaataaagtcacaggtgacattgtcagagggaagggaaaatcctggtctgtggaagggccacagtgaccctgtgagccaagtcgcaacactgaagtcccagccaaatccccgctgtgttcactgatctggagcctgagaccttcacctgtttctcccatcacaagctgtggaacctgagtctcccatgacaggagcagcctcttttctcctattgtggatcaagcctaggcctactctggtttgcctggggcagaaagtcatggccagctttgatgtctaggggtaaaggtctctgtacttggacctgagagggactgagaggcctggcctctggccatgtgtatttgggatggcagcctggctcacagaggaacagaggatactcacggaggagattcagggtgactgggtcactgcggctggcactcactgggttccgtatttcacattcatagggtcctgcaatatactttgtgacaccaaatataaagagggtcctgttggttttggacagctgcaacctgtgagtcatagggaggctctgaccattcatccaccactggtagcttgcggctggagtcgcaggatcacaggttaagatcacagcctccatggcctccctgggatttaagttgctgctggagatggagggcttgggagtctccactgtgcagaaaacagagagaggtttgccctgtgtggcatctttgattcttccaaaggcatttttcaatcagagttggcatttcccacctctcagcccacccaagtccttaaaagcccatggaagatgtgtgtgttaaagacagatgcatggcaatctgagagctcagagattgtgaggctgcctgctttatgtgggagaagcacagactttcttaggtgtgaattgagcagcagcattgggtcatggaaagacacaggaccagcagtcacagacccgatgcctctctgagttcctccgtctccaactgcctgcctgacccaccttgtggtcctcacttggagcatgcagtgctggaatcttcttagtttcagtcttactttgccccccgaggtatgttttctctgcagcttccctttccaaggacatcctagagatggatgatggaacttcccattgtccttaaaccctttgggtactggaaagcctgacctgggactgggtacttcagcataaataacacaggggagaccagagtcaagcctggaggtcagttcagtcatcaggcagtggagccacaaggtggcgcagttttcccaggtgtctcatggtgactgacttgagccagtgacctctaaagatagagcagagtccaaggaatgacctacaaagagtgaaggggacaggcaagagctgatagctttggaccaagaccatgttccgtgttctgggtccatgatgctcgcttccccctgtagagggcaggtgaggaccatgtggatctttctagaaatacatgtggatgtttgcaaatgcagaactgactggtggaaagggcgaacatgaacagatgatggaagtctggccctcatggaccatatgcgtttggtggatattagaccaatatttgggaagaagtcttgcagatactttctctcattagacattctactctctgattctgagtttgactactctatgtacctcatataagtggattccagagtgaatcagagagtagaatagtagtttgcaggagttgggatcaggggaatagggtgttgttccatggttgtgcattttcagttatgcaggatgaggaggttctagagatctcctgtacagcttcatgcctatagttcatacagataaagtgctccttatgcagaaaggttaaaacaaagtgttttcgatttctaatttttttattttggaatatttgcagtacatgtactggtttagcatcccaaatctgaaaaatttaaaatccacaatgcgccagtgagcacttctttttagcatcacatcagtggtcagaagggttgagttttgagcatttcagattgtggatttctggatttgggatgctcaatttgtaatactgtaattttcccgtaaaaagttgtcaggaatttagacctcatgttgtgttctgactctagtaacaaaaaaaaatttggaggaaacattaaaatgttttcataagtggaaacttttactgatgatccagacatcgaagatcaattgctggtagtagtatttctcttgagaccaaaataaggtttaggtgtgccgtgaattccagcaggatcacattatgctcaaagaaagatgccaaaggtgattggaaattagcagctccttaagtagagagagtcccattaaaaggacagaactggtcagtgcgtcaattacataaagggaggaaggatgccaaattaaaagaagtgatgtgtgttatgttagtaaatatagaaagaactccctgcttctaatttctgtgcagagttaggaaaaatggggaggaccccaaaacaggtatgtggaatgctttcttcattttctgttaagctcaggaaataccactaaagtttaagtttgtgtgaaataggaagagtctaagtgagatgccaatggctcgtgtgtctgcccacgtgaagaaatccaacttatgaaaatggcatcatcatgaggaaacagttgtatgtggcacaggcagtaaaaccatcagatagcacccacctggtcacctccaactggtccgcaacaccaccagtattcccattatgtgtatgttacagcctttgtagttgtcccacaactacaaaatttaaaaattgctattgtcaaaaaaaatattaaatatgaaggcgaatatgttgttccacttttttttccccaccctttttgaactttcctgtttcagttttggaagtttctattgacacatcctcaagctgggggttccttcctcagctgtgtgcagtctaccagtaagcatcaaaagcattcttcatttctctaacagcattttttttctgagacagagtctcgctctgttgcccaggctggagtgcagtggcatgatctcagctcactgcaagctccacctcctgggttcatgccattctcctgcctcagcctcccaagtagctgggactacaggcatccgccaccaagcccggctaattttttgtatttttagtagagacggggtttcaccatgttagccaggatggtctccatctcctgaccttgtgcctgcctcggcctcccaaagtcctgggattataggcgtgagccactgagcacagccttctctgagggattttaatgagttgttgactttttacttagtgttagaacggagtcacaaattttaagcttgttatatgcctgacaggaagccagaagtctctaggaagtgacaggagaatgtgagctgcatagcaggttgaggatggagtcccaagtgatacaggagaaatgagtccatgtgctttggggactgcaggcctgtccagcctctgacaccctggtgagtcagtgcaaagattacagcagtgacagcaaactagcatgtctgagtccatctggcatctagtctcaggctggctgtcctcactcgttcctgggcataggccaggctaaccttgggaggaatttagtttatggtttgactttgaagcaggaatgataatagttcctccataaaactaacacccttactttgcccagggacggcctttgtcaaactagtgaaagaccatgagattaagattataggagggaaccgaattctgctaaaatgtaggcacagtttatgtaatccctgactgctccagtgtcatttggcaagagtttacaaaatttgtaactaattgctcctatagataacatcactattgtagaacgcgagactggtcttttgagatgtttctcattcttttgcattctggcaaccggctgacctcattcatacctatgactaatggctcagccagtcatgtggtccctacctagaggcagattcaagcacaaacagatcatttccctccgcccgcatgattccatcaccaaacaatcaccaaaaaatgagcagtactcaatttttagtcctgtgaccctgaaactgtccttgaaaatctctaacccctgctccactggggaggctgatttgagtactaatcaacctccagcctcctgtttggcagacttggagtcgttaaaatctttcttgactagaaaccaacatttcaataattttgtgtgtgtgtgtgtgtgtgtgcagaaggccagaagaacttgtctggcaattatgagtggatggaggaactgcctatccctgtcccattgtcttgtccacaggtcagcctcacaaagggaaagagcccttgaagggaatacagtagaagctcattctcttagtgacctggggacattggctcgagatgaagcctggcaggagtggcaactccaggtgatttctgcacctttcctatttcctgggaggtgggccaggccacagtgttagcgggaaaggaactgaacagccagactagtcagagggagtgtctggggaaggcctaggggtgggggaagaagctgtgcaggacagggcttgccagtcagaatgaagtgggaggaagatgagggacacagagaagaagagagaggcagagacaccatggcagtgagcagtgagggttacactgacttcagagaccccagggaccaggtgccccagttccacagtccaggaccaaggagcccagagaaccctctggtggccaaagagcttcagagttacatgaggtggggtggctttaggggcaagaggtagtggggggatgaaacgtgggtgtcagcctctgaaggacaagggacaggtgtggctagaacctcctatgattctgcatccaacatccagtctctaaagaggttttggatcattcatttcttcattccattccttcatttgttatgtgagagctcctgagtgtgtgtctctcgctgggcctgtgctggtgcagggtgtgagtggggaaagaaaacaaggtcctctccttgatcttctcatgacagtgacatgggcactttgggaaacacaggatttcaagttcagtgatgggggttaagatctgagggggaggcctggacatattttttgcactgactctgatggttgaggcaggtgatttagttctggagtgcagactaatcagctgaccatttgctctcactcctctgaggtttggatgcctaaaaagagaggatttgagccaataaatgactatggggtgcttggaacccagtaagccctcacttctggtggaggagaggaagggcctgtggctgcagacagacctcatgtgaccccgatctcccctttgtgttggtgtgactctggttcagtgactgtgccttcctgtgcctcagttttctctcaatcaaataagctaaatggcaaatggactgtggcttttcatgctatctgtgaataaatgttaaatgattcacagtcacctgacctaatgcttggcacagtggaggtttcacacaaacagcatttattattaatttgcttccatgagaaaacacctttacatcagatccctgtggacaatctgctaccaggtacatcttctccttctgtttctgcttctggggacattagactttctatggactctcctaagccgatgtcctacaaagcttgtctttctatcctctccactctgagtgtcaggtgaagaaagctctgtccttgcccagatgaggctctgagggctgagccctggctggtgaacagctccaggagacacagtcctctgacagctggtaaattcttggtcccagtaaggcctgcccaagaaggaacaacccagcactggcacaggctcctcagctttatctggagcaaggatttagggacagaggtctggggttgaggcttctagggctgagctgctctgagagtatctcagggggcccctcaggccagccctactcagttctccagggtctttgtcagcgtcaaatttatgaagagggcatgaggtgcttgtctgagactgatctcctcctgctgagtccccccatcagactgtccttcctctgcagcgagtgtctgcagggtctgaatgcgggaaaggaattctgatctgttgaaatttgtctcctctgtgtgtcctgcactaaatgcccaaaccccagcatgggacttaatgcagagagggacacaggcagagtccaggcctgagaatcctgtgtgtgtgaagtagaagtgacccctgtcccccaacacccagggatcatgtggaatcactcacggtgtaaggtgaaggtgaaatgtccagttactcctccagtcccatcgcgtcgctttatgatgtgtaaggtgtaggatcctgcatcctcctgcgtgacattctggatcagcagggatgcattggaatatactctttctcttccactgtatgcaggcccatatataattctttgaccgtctactacatatgatgtaatgtaatggtagaggtatgtcatttgccctttgtaccaaatgtagccagcaagattctggggcaaattgtggacaagtagaagaacatccttcccctcagaaactttgggtggctgggcttcaatcgtgacttgggcagttgtgggcggattccagaagtttaaaagtgatgctaggaggtacagagagcatcagttaatattgagacctatgtattggggtgaaaagatgggtcctgagaaggtctcttcaatcctcagccttgaagacacacaaacacacacatacaaacacatacacacactaaaggggcgtgagtgtatgtgtgtgtgtcctactgtcccactaggtcaagatcagcagcatgacccccattccttcaacacttctgaccttggcatttttctttttggattcctcttccccaggggtccgcacggccccctccacactgccctcaggtcctgctcacatcagggcatccttagacttctttcctgatacctccttcagagaccctgggtcttccctttctgacctttccctgctctcctccctccagggttcttgtcaacacctgatctcacattctagatcacttagcatgtctgtcttccccccacgatgactgtgtgagctccgtgaggacagggacttttgtgatcttggttgcaccccagtacctggaacaggcggcagactcctgtagatgtgagagttctcagggtctccaccctctggatgtttctttttccccccaattgttgaggtttcttgctgaggacagtgtttcatgtcctgcttatattttcatttgaagtgtcatctgatatagttattgttatcatttttcaaaatatggtggcccctgatgattaatcaggaaaacagaacacttaagattttcctaccacttaccaattccgcttcaatgtgactttcctattttgaccctctggtgtattttcccctatccaggctccaacagagccttctttcccttttcttcttttttctttttttccttttttcttttttttttttttgagacggagtctcgtcctgtcacccaggctggtgtgcagtagtgctatcttggctagctgcaacttctgcctcgtgggtgcacgtgattctcctgccacagcctcctgagtagctatgattacaggagcacaccactatacctggttaattttttgtgtttttagtagagacagggcttcacagtgttggccagactgatcttgaactcctgatctcctgatccacccaactcagcctcccaaagtgctggcttctttcatttttcagaaccccatcctctccaggagaccccatccagtcactctgcttcctcctcctgtcctctcccaggaagttctctcctcacctgtgagcaggacccccttccaggtgatgcgctgtgtgcagggaggggctgagaggggccccatggtctctgctgcttgtgtgttctcctctgtggagataagcctaggatccagaagcttcctgagtacggctgtcagctgtgctgtccttcctccttctgtgctgagcctcctcccggggcaggagcatttctcaagctcgtgggcggggtcaggcccaggacacctctctgtcccctcctctctcagttctgcctccttgtccctcctgtttttccttttgtctgtgtttcaggtccctgggaattgtggaggcctctgcatttttcagcagtgattctttcaccaaacctcaacacacactttgtgcagatgcacacacacacacacacacacagaagagacacacacgacccacatggtcacacacataccctgcaggttaggcaagcagagtcctgggcctcagcctcctgctgtccccatggctctggggtagggtgcacattcacgccctttaccctcttccttcctcatctggctctccccttcagtgcaggagctgcacaaggttcccgtcacagtgacgtcccattgtgctgtgggtgagctctgtgttgtctggtaagagggacccttcctttctctaatcgtgtctagcttggctgcagcttccaaggatgaacattcagtacctgggtttcccagaggaaactatccatcctggaggtgtgcagggtgaatctctcaggcctcttgggaggagaggcctgtgctgattgctcagtgggggctgtgaatcccagagtcaaagggacagttctcggtcactctgtgtctccctggggtctggcggctgagctggagctcagggtttctcatgttctccctgaccacctttgatgtcctctcttctctgcccagctgattgtcctgtggtcaccacaccttccccgtggtggtgcaggaggaagtggggagttacccaggaaccccgcgggacatggcttgttgagacgcaggagggggagcctgggacagagcaggggttcagagctggagagattcatcccgacttactccgtggccatgatgggctcagccctccctgtgctgacatacccaggggtctgtcctgagggttttgacctggccaagctgctctctgtagaggaggaacaggcagtggccagagagcctgtctggagggaccttgctcacacctgagagggcgggtgggggtgagttgtgttctgggagcaaagaaaaataacaccccccttctccccacaagcacacaggagaggtctgtcttcccaagggacagctggtggcaggtggccacatcccggatggtgcctgtgtgtgaccatcacacgctctctgcgccccctgggctgcagtgggcaggcaggacacagggtgcctggctgattcccggggaggctgtgggccctcaggcagccgctgttctgtgtcagcgctaggcttggcctgggatgccccagagaacaggacagatggagcaggggcgggcatttagggagcagtgacagaaagagttgatgaggatggagggaggtcacgaggggaaagcgtccagtgtggcgtcgcgtgcaccatcgctgcccgggagatgcctttagctgggcccagggaaggagcaggtgtgtggggcaggagctacctgcagagggagtggtgttaggttggcggctgcgggtcaggaaggagctgacagagtccgtgttgggagcatggagggctctgaagacttgggccgaagtgaccctggtgagggtggaccctgctgggctgtgggttccgctgagggaggttggcatcccctaggaaggctccaggctgggaaggactctgtcgccctctggtggacagggagggaagtgtgaacggcagcaatcccaggccaggctgcatgttttattccatgtggatctgcacactttacatgaggtcacacatatgttatgttacagctccatcaccttccagccccttgagtcccagtctgtgtgactctacgttcactgttctccctctttcacaatcagatgtcccaaatgcagatttttgtcaccttctgtgagtttgtgtttgtgtgcagtaggcagcactgtgtataccctgggggcagtgatgtctggggctgagcagtgcacgtgggcttgggagcagaagagggagcagcagggtgggaagatcaatatcggggggcagggacaagtcattttctttttctcactcccagggaccagaacccaggattctgactccagggcacagtaccacaccctgctggtgtccctggatgtcatgaggctcatagtgtcatgttgccttggcattcattttttaagatgtaagtttatttgcctcaaatcagaggcagggcttggtcaccatggcagttttcaatactgtatctggttcaagtgactccagttggtgtgcagagataaaatcttagaggcatctctcctgcttggtgtgctggactcccctctctgcagctgcttctttaaactgataattctgacattcgccttcacatttaaagtgacctcctctcagtcacagcgtgagctcctggtcccagtgtttgttgcttgctttgaacacatccattaaagctccctgctggaaacctgtcagataacaccctggacttaataaagcctgggctcactgacctctgtgtctgtggtctccaaatgtgccgagggctccctagtgtctgtaagtagtacaagaacatacattttcacgttgtggttgtatcattgtagcctcacatgccatccagagcctgacattgaggctgtcctatgggacctgtgctggttgagcccctgctggagctcttgttttggggcctctggttctcctggatacaggagcttccagctaacttgattgaaaactgatgcctttcattgaaacactggctcagatgatggattcatgggcttcagctgccataacaaacaccttagcctgggtgaattaaataatagaaatctatttttcacagttctgtgaataatgtgctattttaaccactttaaaatccacgatcaagtgaaattaaccacatacaccatgttaaattaccatcaccactattttccctagaaaatttttatcattttaaactgaaactttgtatcttttaaacaataactctttgtatgttctactctagaccttgatcatctctactctgtctctatgaatttgcctattcttgatgtttcatataaatggaattatacaatgatgttattttgtttctgacatatttcacttagcataatgtttccaaagtccatgcatgttccagcgggtgtcagagcttcattcctctttatggcagattaacattctgttgtatgtgtcaccatatttatttattcatgtgttgatgaacacttggattgttttcatattttatcttttgtgaataatgctgcaatcaacattcccatgcaagtacctgtttgagtccctggatttaattttttgggtatatacctaggaatgggtgttgtttcaaatgagaattctgtgattagctttttgagaaacagcaaaactgtttctcctagtggctgtaccttttatattctcaccagcaatgtatgaagatttcaaattctacataatactgctacttgttatttaacattttaaaagaatgttagccagttttgtaggtgtgatgtggtgtctccttgcagctttgactttgtattttcctaatgactattgatgttgagtatcttttcatgtccttcttgactatttgtatatcttctttgaagaaatgtctatttgagtcttttgcccatttataaattggatgatttgtcctttctttattgagttgtagctagttcttgatattatctggacatgaaaactgcctatatgtggtttgcaagtattttctctcattcggtgtctattaaatattttcttgataatttcctttgatgcacaaaaggctcacatcttgataaagcccaatttatctttttttcttgttactcatgcttttgtatcatatctaagaatccatggcacatttgaggtcatcagtatgtacctctgtgtctattttaagatgtttttatggttataggtcttatatttaactcactgatcaattttttagagaattgtttcatatggtgggaggtagagttatttaaattaactgttttgcatgtggttatctagtttctgcactatcatttgaaagaagaattgttaatccattaaattgtcttgacaccctcttcaaagagtaattgatcataagtgtgagggtttatttctagactctcaattctatcccatttgtctttatgtccattcttttgccagcagcttctgttttaataattgtactcctttgcgaggtttcaagtaaagttcaagcctacaatttattttggcaagattattgtggctattcagtgttccttttctgaaaggtggggaggccaatgtttcaccattgggaaagccttttctgtcttcttcagggggaaatttgggagaaccttttaagaaactttatctaagtaggtaaactctcaccactttatttgctgaagtgctatgttaaagtgtgcattgcctcttgtggaagaattgtgagaccctggaagcacctgcccacgtggtgagagacagtgaattccatgatgaggggcagagaggatgttgttttgtgatacaatgttgttggggagttgtatacatctctatttctttgtctctgtacagtgggtgtagggaccagccccacagggtcggcgggtttttctccccatgtgtggagacaagagattgtagaaataaagacacaagacaaagagataaaagacagctgggcctggggaaccactaccaccaagatgcggagatcgttagtggcctcgaatgccaagctgtgctgatatttattggatacaagacaaaggggcaggataaggaatgtgagccatctccaatgataggtaaggtcacatgggtcatatgtccactggacagggggcccttccctgcctggcagccaaggcagagagagagaggagaaagagagagagcttacagcattatttctgcttattagagacttttagtactttcactaatttgctactgctaactaaacagcagagccagttgtacaggatggaacatgaaggtggactaggagtgtgaccactgaagcacagcatcacagggagacaggcctctgaataactgcgggttgacctgactaatgtcaagccctccacaagaggtggaggagcagagtcttctctaaactcccccggggaaagggagactccctttcccggtctgctaagtagtgggtgtttttcctcgacactgaggctaccacgacatcatggttcgcctggaaaccggcatcttcccagacgctggcgttaccactagaccaaggagccctctagtggccctgtctgggcgtaacagaaggctcgcactattgtcttctggtcacttctcactatgtctccccagctcctatcgctgtatggcctggcttttcctaggttatgattatagaccaaagattattataatattggaataaagagcaatgctaccaactaatgattaataatattcatatataatcatatctaagatctatatctggtataactattcttcttttatattttattatactggaacagctggtgtcctcggtctcttgcctcggcacctgggtggcttgccgcccacaagtgggcatctccattggacacagtaggttttgaaatccttgtttatcctctggggtctgggtcttggcttacctgttagctgcagctgaaagaggtgtctgctaagtcaatgacacctgtggggagaagaaggattcagcagagtgaaagtagctggggctcagagaagccaggaaagtctgactcttagaaactgtgggtcagcagatgggtgtcctcagggataaatgggccatgccagtagccactgcagtgaactggaagaaggtaagggatgctgggtatcccatgttctgtctcagctctgcagctgaagatttgggccctgggctggtacggccctgcagcaggggaagggtatacaggaatggctgcatatcgggacaaagtccatgtcatcttcttaggcattgttactgcagatggaggattgtgttcagagacctggcctaaacacatgggagggcccaccccattcttttaaaattattttaagagaacagtattagcaaatgtggtacatgttttattctgctagaatcagtcttactgtcacgttttacaatgtatctcttaggaaatggcaagagtcatccacacaatgtgcatttaaaggggactctactataatttcagctttcctactctttatagaaaccatcttctctgcaaacacacaggcaatatctctgtattcatttctattgggagccctgtatgcaaggtggagagagccacatttcccctgagattttacgtaaaagtttgaggttgagacgacatatctgacactctgttgttatcctcagaagctactacatgtgaaattctaatgactgcattatcctgccaagtgaaagaggcaggcatgagcaaggacagttaagaggggtgagagcctcatcatgatggggagtcttgttctgacatcttgggaaaaactgtccacagtgtgaagtcatccacttgttgtcctggtttacagtttgagcagctgttgttatggtgtcgaacattttggtgagttctgagtggctcacgcttcaggtacaagggttttcccatgaaatttacattgagttgtccacctcccgcttataggacttctggaacagagtgggtcttgctcttcgtgattccatgggagaaaatggaattggaggaactagtagaattcagggtaatatccagtctacaggtagataataaaaacacagaaacaatgaacaaagttgcaatctcataaccggtgtactacggtttttattttccacattatttttctctctatgggcatctctagttttaccaatgataatttcagtagaataaatttgtttgcaaaataggttgagtttcttcaaacgtggtctgattctttacataagtgcagcaagagtagcaatggaccatgtaggatctcttttaaaatttttctttgctctaagtttttataaggaatctcagattaaacttttacaaacctcttgagaataggaagccaaaccaaggctgagtttagactttgcctgcagttcatactggttcattctgtctatattcttaaatataacatcccagtcaaagccttggtaatataaccaatgatttgaaatgtgtcctgttacaaagagagcagattgttgctgtacttgtgcaaatatctgtattaccataaacatatcaatactcatgaatagttgcccaattctggggcagtcaggtagagagcaaaagtaaatgtttcaattacagttcccagaagtatagtttattgaactgctataagctatagatagattaaaagaaaaaaattccataaatctagaaaacaaaccatttaaagaatcagcaaattttcaaacaaaaatcataaaaacattatcctcattattatcaattgtttcaatgaaatcagtgtttttcctgcttggtataggctgggaattttaagaagatatcagcctgtttcttaaagttttggaagttcttagacagtccagtggtataatctgaaagttatcagaaacttgtattaaagagttcttgtcagcatcttttccataaatctccttgaaaaggaagcagttttggactgtagctgattggaaatgctttgaggaagaataaaaacaacatctgtgaatgacaaagattttaaatgactatggtttaaactctgatgataattcattatgataacacagctcacaaaaaaagttacttctgtggtatatgacattatggctgataacatatttaatttctaggaatctcatacaatttctggaacaatcatatcagtaacatatccattaatataacatagagaaagtttagcatcctttaccacttatgatttgaaaatgcttttcatataattttacatatcaaataaagtggcttttccatgtagcttgtgtttctcagcaggattactgaggtctttgtggaggccattaatgaatagggccaggaaagtataggctcatgtatgctgaaaaatttccctagataattccaatactcccagctaataagcattaatttaggtctaagttttacctattagaacagctgttctttatcctggttacacattagtagcatctgggaagacttaaaaactaacaatgcctgccagatgcagtggctcatgcctgtaatcccagcactttgggaggctgaggcaggtggatcatgagctcaggagatcgagaccatcctggctaacacggtgaaacactgtctctactaaaaatacaaaaaaattagccgggtgtggtggtggttgcctgtagtcccagctacttgggaggctgaggcaggagaatggcgtgaacacaggaggtggagtttgctgtgagccgagatggtgccactgcactccagcctgggcaacagagtgagactctgtctcaaaaaaaaaaaaaaagttaccaatgcctgagtctcactttagaccattaaattggatcctctgggtggggcttgggcatccatttaaaaaaatgttttctggtgattccaatgtgaagctatatttcccatcagatttctctgatttcttgtggcattcactttttttctattttggtattataattatttttctggtcttatcatctatcttaggctttatgttccttggggtagaaaccttgccttcttcatttctgtatcgttcatgaacatatgagttggtcatcaggaaaaggttctcaatcacatgtaggttgtgttctgagtctcaggtttacacattaatgctggagtcattttcctctgggaggtcagaggttgcttttgatgaagggtatgggtaagcccataatgcagatggtagatgggagatcacactgtttttagccacggcattggaactaagcattctatgtgtatatcaggtggaagggaagggatgtgtagacagacagatttaattagaatggaggaattacactagggaatagaggtaatggaaacagtaaaaattagtaaagagaagaaatgtgaacttatcaaataggcaagagtcgatctctgaagatttttgaataggggagttaactagaatttaggaaggtaacaaggcagtcacacacaaggaagatttcaaagactggaggtaagtcaaacagtacctctagcagttattgaggttgtgggaatggagagaatgacacaagtgagagatgttaaaaaaaaggatcaagaaggttttataagatattgaatctgggaaacaaattagcagaggttgaggataatcatttgtaggagacagtggggtacagggagcatgaagaacaggggagaagagacctgcaggaataaatgctgagaagcaggagtttagtgggaggaggaggagatccagtcccaaatactggcaaagaagtcctttccctctcccaagcaaggcagtcagccctgcaggaaacaggacaaaaggaaaggccatcataccttccagtcttcctgaaataaactacaccagggctggtagatcagagccacactggccagtactccaatcaggatgccgacagtggctctacctgaaaggccaggagtacttcttgtactgaagtatctgtcatggaaagaaaagaagagaaggaataaaggtgatgttattttacagtgtgctaccttaggaaccatcactaagtatgaggtagtttctacttgttccttcagggattaattttgtgggagggttgctggtagatgattagccaactatattcttgcagtttttttatctctcaatgtgtttctaggttagtgatcagtcttctgtcaatttcatcctgaccatgctgcactcagacatttttgaaggtatcataaagatgtgagaaaggctgactgctattttctgtgtcattagaactttctaccctttcgtggttgcatctttttctcagtgtgtcagttgtggtaggcatgaataagactgtcagttctccatggcagcttgtgtttctcaaaaggattactgagttcttggtggagcccattaatgaatagggcccagaaagtataggcttatgtatgttgaaaaatttccctaggtaatcccaatactcccagctaatagttgattaattaataatcaattgacttgattgacagaaggcccagatcagtgcattccaaattgacaacctactttgcatagagtcctcactttcctgaagctcccagcagggatatgaaagcaagccccgttctgcgagattctgttttactctcttgggtgactggtgggaggactccctgtcagccttgccatgctctctttgaactgaagctaaatcttctttctctttctccctcacaggagtcagatttgcatagtgctctcaaggctctcccagacttttttcatgcctgccccactttccctcacaggcatttttcctaatacattatcctgcatgtctaatctcatcttggatgcatctcagtgggtataaactaacataccaggcttgatttttttgcacttagcttttttctctctctcccacatgtagccagtaactgtgtcctagtgttttatgtgttacctgttttttcttgtgtataggaaaaatatatatatttccatatacttatttatatataatatataataacaaaatatataataatataaaatgtataataatgtaaaacatatacacatttccatatatgtatatggaaaaagaggtaacacataaaacaccaggacatttatatataataaaactgacatattttatatgtgtatatatatatatagtatatatatatatatatatgtgtatatatatatatatgtgtgtatatatatatgtgtgtatatatatatgtgtatatatatgtatatatatgtgtgtgtatatatatatgtgtgtatatatatgtgtgtgtgtatatatatatatgtgtgtgtatatatatatatatatatatatatatatatatatatatagtgtctggtagtcttaacctctctataaatacacactttttgtcactgccccttccctcccatgcagagctcccatggccaaatctcctatttctccaagtgtgtgtccctcactgtcctctgtgctgtgtcccatgtgctgtgtccacagcctcctagtgttttatgtgttacctctttttctatatatacatatggaaaaagcatatacatatttatctctatatatttatttatataaaatatataatctaaaagtatatatatacaaccatttaaaatatatacatatttccatatatataaaaaaggttacacataaaacactaggccatttatatgtaaaattcacatatgtaatataaatgccaattttatcatatataaatgataagtatatacacgatagacttatcatatataaggtgaatttggaatgctctgacctgggccctctgtcaatcaagtccctgccatggaggccactcattgctgccacaactgagacaccaagagaaagatgcaactatgaaatggtgaaaagttctaaagtcatagaaaatagcaatcagcctttctcacattccaaatccttcaaaaatatctgagtgcaacatgtccaggatggaatgaaaaacttcaatcttgaaaaggaaaaaggaagctggaggactcacactttcagatttcagcatctactgcaaagctacagtaatcaatacagtgtggtactggcataaaggaggacatagtaactaatggcatagaatagagaacccagaaagaaagcttgcatatatggccaaatgatttttgtcaagagtgccaagaccattccatggggaaaggacagtctttttaacatgtgataccgggaaagctggctatccatggacaagtatgagttgaacctttacctcacaccatatccaaaaaaatgaacccacaatggatcaaagacctaaatggaagagtgaagactaccagactcttagaagaaaacatgaggaaaaagcttcatgatattgaatttcagaatgatttattagttataactacaaaagcataggcaacaaaaaagggataaattggacttcatgaaaatttaaaacttttatatatcaaaggccattatcaagaatgtaaaaaggcaaactatcacatagggaaaatatctgaaaatcatatatctcataagggattaatttccagaatacatgaagaacactacaaaccaaaaacagcaaaaatccaagaacccaataaaaaaatggagaaaagactaaaatagagattttattaaagaagatatacaaatggccaatgaggacatgcaaggattctcaatattaatacttagagatatgcaaatcaaaaccacagtgatacatgacctcacacacattagggtggctttgataaaaacaacatgaacaacaacatcagaaaacaaatgttttcgagtacgtgggaaaattgaagctcttagcgtattactgatggcaatgggaaatgttatagccactgtggaaaaatggcatggcacggccagctcacgcctgtaatcccagcactttgggaggccaagatgggtggatctcttgaggtcaggagtttcagaccagtctggcaagcgtggcaaaaccgcatctctactaaaaatacaaaaattagctgggaatggtggcatgcacctgtaatcccagctactcgggaggctgaggcatgagaatcacttggacctgggaggtggaggttgcagtcagccaagattgtgccattgcactccagtctgggtgacagagcaagaccctgtctcaatatcaacaacaacaggaaagaaaatggtatgtcagattcttaaaaaaattaaagaattaccacttgaaccagcaattctacttccggacatacagccaaaagtattgaaaaaaatttgaacagatatttgtacactgatgttcacagcagcatcactcacaatagccaatgggtggaaacaaccgaaaagtctattgaaagataagtgggtgaacaaaaaggtatatccatgctttggaatgttcttcaatcttcaagggataaaattttgacacatggtgcaaaatggatgaatcttgaagacattatgcgaagtgaaataagccagacacaaaaggataattattatatacttccatttatgtaagatagttagaatagtcaattacatagagacagaaattagaatggtgattaccaggggttaaggggagaaggaatgagagttatcatttattgggttcagaggtttagtatagtaggataaaaaaaagcactggaaatggatagtgttgatagttacacaacactaaatttcacgcttagaaacagttaatggtgagtcttagatatatagtgtctagtactcttaccctctctataaatacacactttttgtcactgttccttccctgccatagagagcttctgtgagttaatctccctatttctccaagtgtgtgtcactcactgtcctctgtggtgtattccatgtgctgcgtccacagactcagagaggcagtgacttcagagccaggacacagccctattcccattttttaaagccttactcatgggaggcttggcttctactggcagctcgatttagccagattcagaaccggccacccaggcaccttatccacatgccctggccccagcccgggtggagtcagggtagggtcagtcactgggtgagcccacagcaatgcagggagcagagtctgagctgcttctccctcacccaaggggcttcctcctctcatttggggaaaagtgtgggcttgttttgaagcctctgatgttcatcacagctcatggagtacacacacacaaaggagacagaagggatattttggtgacagaaacagcttgaccatgaggaccctcctctttctccctccatgaaggcccttatactgcatagtgcttggggctgataaagccatttccctacatttctcaggctggacccaaggtcatccaccagaaatccggaaaacaaagggaagagaatctgtagatatgaattgggagggttcaggagaaaaatttggatttacttttgtgcatgggacacaggctgagaataaaaatgttttcctggctctttcttggaaagccagataggcttcacctgaaagcatattgccaatgctccagcgatccacttaccagggactgtgattttcttggttgcgaagtttttgccattagtgactgggttatggacataacacagatagtccccactattctctgtagtgacttgggagataaagacctcttgtcctgtttgctggttattcccattcagcagccaagaatgctctactgatgggttagagcccgcaaggcaggagacattgaggtttgaccctggatagtaaaaggtgtctgaagaataagttgtgggttcatctgggccatctggagcaaagagaataaagtcacaggtaatgttatcagagggaatgggaagctcctggtctgtgaaaggggcacagtgttcctttttgccaagtcacaaccccaaagtcccagccaaacttcctctgtgttcactgaactggaggagtcaacgacattcacctgtttctcccatcacaagctgtggaaccagagtctcctaagaccagagaagcccctcccttcctgggcctacccaggtttgcctggggcagcaagtcatggccagcttgggggtctaggggtaagtgtattcatacttggacctgagagggactgagaggcctggcctcgtgttatgtggatttgggctggcagccttgtccatgaaggaaaagaggatactcacagagaacatccaggtgactgggtcactgtggctggtactcactacattcttcctttgacattcaaagagtcctgtgtcactccttgtgacactgagtagagcaaggatcctgttatcattggacatctttagcctgggactgagtgtgagtctatgactatttacccaccacatgtagattgtgccatgagtctcaggttcacaggttaagaccacagcctcctcatcctccgcggggttgctggtgacatagggcttgggcagattcactgtgcagataacagataagattcctctgtgtggcgctgtgtccggaattggtgggttcttggtctcactgacttcaagaatgaagccgtggaccctcacagtgagtgttacagctcttaagttgacgcttctggagtttgttccttctgatgtttggatgtgtttggagtttcttccttctggtcggttcgtggtcttgctggttcaggagtgaagctgcagaccttcgtggtgagtgttacagctcttaaggcggcgtgtctggagttgttcattcctcccagtgggcttgtggtctcatggtctcgctggcttcaggagtgaagctgcagaccttcacagtgagtgttacagctcataaaagcagtgtagacccagagtgagcagtagcaagatttattgcgaagagcaaaagaacaaagcttccactatgtggaaggggaccccagcaggttgccactgctggctcaggcagcctgcttttattctcttatctggccccacccacatcctgctgattggtagagccgagtggtctgttttgacagggtgctgattggtgcatttacaatccctggagctagacataaaagttctccacctccccaccggattagatacagagtatccacacaaaggttctccaagtccccaccagagtagctagatacagagtgtccattggtgcattcaccaaccctgagctagacacagggtgctgattggtgtgtttacaaaccttgagctagatagagtgcccattggtgtatttacaatccctgagccagacataaaagttctccaaggccctagcagagtagctagatacagagtgtcgattggtgcattcacaaaccctgagctagactcagggtgctgattggtgcgtttacaaaccttgaggtagacataaaggttctccacatccccaccagactcaggagcccagctggcttcacccagtggatcccacactggggctgcagatggagttgcctgccagtcccacgccatgtgcccgtgctcctcagcccttgggtggttgatgggactgggtgctgtggagcaggaggtggcactcctcagggaggctccccccgcactggaggctcgggccgcacatggagggggtgggaggctcaggcatggcggactgctggtcccgagccctgccctgccagaaggcagctaaggcccggtgagaaatcgagcacagcgccggtgggctggcactgctgggggacccagtacaccctctgcagccgctggctcgggtgctaagcccctcattgcctggggccagcagggccagccggctgctccgagtgcgaggcctgccaagcccacgcccacccggaactccagctggcccgcaagcgccacgcgcagccccggttccgctggcgcctctccctccacacctccctgcaagctgagggagctggctctggccttggccagcccagaaaggggctcccacagtgcagcggtgggctgaagagctcctcaagtgctgccaaagtgggagcccaggcagaggaggcaccgagagcgagcgagggctgtgaggactaccagcatgctgtgacctctcagcaccactgatttctccatgagcattttccaatcacagttgacatctcccacctctcagccaatccatgtccttaaaagcccacagcaggtctgtgtaccaaaagacagatggatgcatgatgatctgagggctcagaggccatggggccacctgctctgtgtgggagatgcatagacttctgaagtgtgaatcgagcagcaatgttggtgaagtgtgaattgagcagggtcaaacaattagagtttaattaactttgtttaaattgggcagagtacaagtgaggcagcagtggctcatgcatctccccaaacgaaggaccacaccttatgacaatgttgttattatgaatacacaggtgtgtatgaaacaggcagtaaatcagacagcacccacctggccagctccacctggtcctaggaaccaccagtattcccattatgtgtatgttacagctttttaggctgcaaaatataaaatacaacttcagaatataaaatatgctattgttgatacaaaatattgaatatgaagctgaatatgttgttccactttttctcactcttgttaaactttgctgtttcagttttggaagttcctattgacacacacttaagctagagattctttcctcagctgtgtgcagcctacgagtaagcccatggagggcattctttatttctcttaaagtgtttttaatctctattatttcttttccttctttcttagaatagccatctctgtttaagtcacccatctattcctgaaaggtgtctcctttttccatcataatccttaaccagagttgttttaaatttccagtctgataatttcaacatccctacaacatctgtgtctggttccaatccttgctctgtctttcaaactgcattattatttttttttttttttgccatagtctgtcttgtatttttttgaaaactacacatgatgtactgggtaaaagggacttgagtgagcaggcattcagtgacatggtggtgagtgtggcgagggaagggttctgtggttctggatgaggtctgtgtcctgggctgtgaatgtcacaagtgcctctcaggtttttctttccattaggtgggatatgatgacttgaggaggctggagttggatatttcccctccccctggccagttaagctcccatcaaaccccagctaattaggctgcagtaaaatagtttctcttaaatttaggtcttaccaagaagaatataattcactgacaactttccaagtgtttttttcccttcttcctacaagaaggatgcagggattcttgtttgatattgactgtgagaacctggtagagctccaggagctaaaagtcataaaactgtccccctactcccaagactaatccatccactgttgtgtttatctctgcgctgtgtccacactgagcctccagaatttcctcaattagagttcaggttttctgaccccagcactggttcccactggggtttctgtgcctatgtttctgctcaggtacggtgcactgctctgtatttgcctgtgggtctctccaatatgtggtccagttagcactgagaacttgcttcctgagaaatctaaacgagttgttgatttttcagtttgttcagctttttacttgttgttagaactgagtgaaaatttttaagctacttacatacctgatggaaattcgaagtctctagggcatgactggaggatatgagcgccacagcaggttgaggatggagtcatgagtgaaatgggtgaaatgagcccgtgggctttggaaactgcagatctgtccttctgcctctgaccccctggtgagtcaatgtagaaagtgaaaccacctttgcaaagcatatgatgatgagagaaagctagcttggctgaccccatgtcacccctagcctcaggctggctgtcctctctgattcttgggcataggccagggtaagcatgggaggaatttatagtttaactttgaagcaacggtgataatagtccctcctgaaaattagctccctccttgtcggggactatcttggtaagtctaagaaaagaccatgaattatggaggggcccaaattctgctaaaatgcaggcatagtttctataatcccttactgctcaggagtcatgtgtccagaggtcacaagatttgtgaatttcctagttgctcctatagatagcaacactattgtagaatctgagatttatcttttcagatgtttctcagatttttgcattccagcaacctgctgacctcatctagactcatgaccaatggctcaaacagtcatgtggcccccactcagaggcagattcaacaaatacagaccatttcccctaccggcatcatttcatctttagccagtcaacagtacttattccttagaactttgcccctcaaagtttttgaaaaactctaacctctgagccattggggaagctcatttgagtcatgataaacttctatcctcctgtttggcagccttgggctaagtaaaaccattgtttactgcacatcgccttctcaataaattggctttgcctgtgcagagggcaagaacatgtcaggtgattataagaatggatggaggagccactgatctctttctggtggcctgtttcatgagtcagcctctcagagggaaaaagccctggactgggacacagtggaagctcattctcctgttgacccggggacattgccttattatggagcctggcaggggtggctgctttggctgattttggtgcatttttcatttaccagaaggcaggacgggcctcagtgtgagcagaaaggaaatggaacagtcagctttgttagagagggtgtctggggaagtcctcagggtggaggaagctgtgcaggaaagggctcatcagatagaatgaaagcgggatgcacttttttcactgaacacctttcagacatctcaccaactctggcctcactgggctgtgcctttcctcctgagccctgagccctgattcctggcagggagggagaaagagaggaagggtgaagctgggatgtgtgctgtccaggtttcttccatctctggaatcttgacagtgagggaccctaatgtgttacctcagaggagaccgtgggaaaaagctgtttcacaggggtgcctggcttatgaagtgagggaaattcagaccgagttggactcatgaactactgggaccctgtcccatgtcagcaaacagcttttctagctcagcgtttctctctgtggctaactcttttgtgtgatttctgagcccatgctggagtcctcctcatgatgcctgatggtcagacctgtgtggggagacctaatgatggggtgggggtggtcttgagtgtcacacagagtgtccagggaacaggctttgtgactttctctaccccagccccacaacaagatctggatagtgggctgggtcagataaagtcagaatccatggggaagggtatgtgtcctggcagtgccgaggttcgtgcctccaggttagctctcagtttctgcaaatacatttatgttgtgcatgtgctgtttcctggactgtttcatgtccttaaatccttgaacctgtctgcagataatgtcatgagaggtctgcatggaagtatataagggctatctgattagggtgggtgtgttttacatagtgggttttttttttcaccaaacacttttcaaaaaattgtggttgagtgtatatatagaaacacatacatacttatattcattagatgtgagcatatattcatataaatttaatatgtagatacatatgtctataaatatacacatatatgtgtgtatgtatatgtgtatatatatgtatatgtgtatatgtgtgtgtgtgtgtatgtgtatatatatatatatatgtatatatatatatagtgccattttaaccacttaaggggagagagagagagaagagagtttctgctaataccaaatctgggttaaataagggtggtcctatttcctggggttgggcttttgctacatgtgtcaattcctgttggaagtgagctagagaggttacatgcttaaccaatttagagattttctatatgaaaatcatctgtgagcacattgataagttctatcctttcctaggtgaaaagcttggtgtaggattttaaggacttcccattggctgaaggctggcaaatggagtttgccatcctctgactacagccattctgaggactggaaagaataccctgagaagtggcctattttatttctgcaggaaggtactgaggtttaatttatcttatggagtcttcctagattagaaggctttgaggtgtgttgatgccttgccagtgacttagctgcctgatcagcgaacctatttcctttggctacttcatctgttccctttttgatgttccctataatgtatcactgctacttcacgtggaagaaaactgaggataataacctgttaattttttggtgatatttcataggaaatccattggtggtaagaaaatgccttttattttaaatggcagcatgagcatgaagaactcaaaaagcatacttggaatcagtgtaaatgttagctacctttcccttgcttaatttaagtgttattttaataactatttgtttagctgatggagcatctgcacctgaagagagatgttatttagagtgactactgcttatcctaccttatgtatttcttgctttaccagctgattgttagctaagagctccctctagaggaaagtaattttgccacattaagtggaggtgtaaaccgttttttcctagggttaatttggaggcttttctgattagtagagctattgtgacagtggtttggaagcagatgtaaaaaataggtcctcctaactgcaaataagaggttgagaaaaatattggattagaatttttcctgagacaccccttatggttgtgctatgggaagaggggaggcctggataagaaaggagaaaagagagagactggatctagtgtttagaaggaggtctactttccttcctataatttccagaatcacctgtgtgtcctgtgctgtaatggcagtttgagctgctggggccaggggtttgagccccaggacccatcagtcctgctggaccactgtgagactggttctgaacccagtgacctccatctctgggagcagttgcatctccagcggtctccaccacaggctggacagggtcaaggtggcttcctcttgctgtttggacactccttcctcaaatgccctggcttgccacaccgagagcaactagtggatacacctctgggatcctggacttgcaactctgcaaagcagctactagaggctttgtccttctcttgagcattctctctttcttctgggccttctcctagtccctattataaaagactgaagtggctacccttagaaggttttccaaggtgctatctgctactatagcttgccttttataggttccttctaatattgggagctttctgtataataaaacttatcttttggaatgggctgtcacttgactgaatcaggagataaaaaggtgtgcactaatagtgcccctctcaacctatccataaaggctgcaggattctcatctggctttgagtctatcatagacagtttagaagaattaagaggtctggccttagtttttcttttccattgatctgcagagctattggggtttcaatcagggttgtcaagaggtactgcttcacttcttatttggagtggtgtttctgctatttcttcactttctgtatctccttccttcccttttggtgtattataggagatatgttgctcatctccaaaattctctgctgcttgcagagctgcctgtttttcagctacagttagggtttggcttaggagcagcataacatccttccatgtgaggcgaaacacctgacttaaattctggaaagcttctatatacctatcaggattgtctgaaaattggcctaagtcttactttatttgcctaaggtcctgtaatgagaagggaacttggagggaccccaaattatggagattcttctcagatggttcccttggaagttgcttttctaatatgaggggattattctttataggccttcctgatatggctgttaaaaaaatctgggttgctgttacaatgcttgtaaaggtttagtaaaaatgccctgtcattgtacaaaatagaatgagttgcttttctcttgaaagtcctgaggttaaaagagttctagtgcctcagagtgcactccagaggggtgcaagctgaagatgctctgttagccatctagaaaaagaagtgagaatgaaagtgtccttatagtcctccttctttcattgtgacccacagtggagtggaagacagtgggagcgtccccccaaatgttttctctccttggttcctgagtcctggcactgtcttaaatgtgccgcccatggttgtaggtgtggccctgtaagccatggaactggataaatgaagtgatgggattagccacactttacccatgcaaccttagcttatctgcctgtgatctgcctggcttcctgaaaaatggatctctggagaaactgtagcagttgcctttgagcaagctttctttaagagagggaatgtgccagttgccagttatggcccgtgctaaaatatttaccctcagaaaagtggtcctggttaactctgttcttaaaatatccttactaattaaatactgttctaattggagatagaataagtaccttaaatgaacgtagggacctaatggcagtttttcctgctgatgggacaatattggaactaaaatttggctatggaagacattttacctctaactgttgaaagcagagttttcccattcacagaaagggcttttctatcagtgcaaaaagagacaattggaaaagtgcagtgttatggcaaaggaccaacgatgtgcctcatgaggaggatttctgtttccactaggtgacactgttggcttagaaataccatgtgcttaccaaaggaaggagagagagacagagagagagggaggtacctattgggttagttattatagcatgtaccgatccttcctaacagaagtgtttccctgaactgtaaaaatttctacatattgcatacacagaaagaataggagacatagagacaatggatagaaaggaagaacaaatttgcaacaggatagcaaattaggagacccattaccaacatctggatgggctgtcggaggctgtgttcagtccagaggcctttgaataacatcagggtgtgtcctggccagaaattctcagctgctccaggacatcccccagcctcatgtgatggtgaggttctccatgaaaggaaactagttggaagagaaccttgaaattaaaggacagatttgaggtttgctccatactcaccattctgatgtttctatcttctcttctgatcacaatcccagatgagaactcccaaataaaatggctctgtttggtaatctatccattgttctttgtcacacactgaaaaagaattcaggacatggaaacacatgaggagtgggtttaggagtgaaaaatttaacagacaaaaaagaagagagagagaaaaagctttctcatattgagaaaacagtcacccaagagaaggtctccaatttggggtggaatgtaattgattttgtacagagacttaaggaggcagtgattgatttacatagggtccaggggattgttttgaccaggtgtgccgtttaaatagcccgagaaaagactggccctcccaccctaatcttttattatgcaaatgtgacttctacctggtggtcaccatgacacctgcacatgtggtgacaaggaaaaaagggcaggaaccgccatattgggagtacctggctcttagttgcctgcagctatatatgcatatctgtgcttgcagcctgatcattcagtctgttttctgttagaaatggtttgggggctgctttttattaaaggaaaattccaccaagaattcttttaccctttctagctgcctaaaaataatttctcgataactcctgtattaggacccctttaggaaaacagaaaagatgacacagactctcctgtaggggagtaaccatagttttttttctcatggaaccccaagagttgcaagtgaacggatttctctcaggtctaaaactctgctcttttctccactgtgttacctgacctctttgcctgttacattactttgtactgtaaaagtatttgaccttgtgtgtgtaatggttgctgggtcagtgataggagctatggttttgaaggtgactaacagtggttataataaattattctagcttcagaggactactcatttctttgtatgtttagatgcaaaagacacagtttaaacaattaaggaaatacctttgtagcaaagtactctgtggaagtgttgcaaagtatggtccccattgcattttcctcttcttggggacctgggattcagtgaaatccttgatttttaatgtctaaatgttgtcccttccaactggttctcttttttacatatttaaatgattagaatctaaaaattgaaaagactttgttggccctcttccttaatgggctctatcttgagcacagtgattcagttgaagaacagagaccaaattaaaagctacgtctctaaataaaaaacaggtgctgcagaggatgtggagaaataggaacacttttacagtgttggtgggactgtaaactattccaacccttgtggaagtcagtgtggtgattgctcagggatctagaagtagaaataccatttgacccagccatcccattactgggtatatacccaaaggattataaattatgctgctataaagacacatgcacagatatgtttattgtggcactactcacaatagcaaagacttggagccaacccaaatgtccaacaatgatagactggattaagaaaatgtggatcatgcacaccatggaacactatgcagtcataaaaaatgttgagttcatgtcctttgcagggacatggatgaagctggaaaccatcattctcagcaaactatcacgaggacaaaaaatcaaacaccgcatgttctcactcatatgtgggagttgaacagtgagaacacatggacacaggaaggggaacatcacacaccagggcctgttgtggggtgggaaaaggggggagggatagcattaggagatatacttaatgttaaataatgagttaacgggtgcagcacaccaacatgacacatgtatacatatgtaactaacctgcacattgtgcacatgtaccctaaaacttaaagtctaataagaaataaataaaaccccatggtaaatttctattatttttgtgttaccttggcatctttttaatcttccttgaacacaccaaattttttcttgaaaaagcttaagttctctctctctctctctttgctttgagatgtaaatgtgctatgtattttctctaaaacttggtaaagccctcctcagataaatgttaacctttaccatttacaagaaagcaatttgaatccaactatcctttaaaatgatgggttttactgatgtcatacctaaagccctaaaatcaaaattctaaaatctttttgtctctatctttatgtgaacatatatatgttatatattttatcacatacatgtttatgtcacacatttatatactgttgacacatagtatcaaattaatgtaaaaataaatgggtacatacaaattaagtgaataagcccaaatgcttttctatacatgtgattttagtaacctttggtgaatatagatagttttaaaattgttggtaaaataaagtagaaatgtcttcataatttaatttatacgtttttgcctatgtctgttggcaggcaggtttatattgtctttactagatgttttaaggtcatcaaagagttgcttccatatatatacattttcttaatttgtctgtgagcttatgtctttatatttgaagctttaaattctgagttctagatgagtgaccatagtaagaactggggacaaaacccatcccatcctccagctgtgccttttggccatgctgggagaggtgggattatccaggcattttcttcatagctctgttctttgtcttgggctttgcatctggtacatagttagaatgatttactccctagttttttttctactgagaataaggctgtgtaagtctgtttttacattgctacagacaaatacatgaacctgaataatttataaagaaaaaaggtcgaatggtctcatgattcagcaggttgtagagtaagcatgattctggcatctgctcagctttcgaggagccatcagaaaacttacaatcacggagaaagccaatggtagaggaagacatcttatataatgggagctggaggaagagagcaagtgttgcacactggtaaacaaacagataaaaactcactgttgctacaacagcaccaaggagaagggccttaaaatatgagaaaccacgtccatgatccaatcacatccaaccaggctccacctccaactttggagattacaatttgacttgagatttaggtgggggtaaagttccaaaaaagtattattctctccatcatccctcccaaatctcatgtctttctcacatttaataatataagaatggcttcccaacagtctctagagtcttaactcactcagcattaactcagaagtccaaaatagcaagtttcatctgagacaaggcaagttccttttacgtatgagcctgtaaattcaaaagcaagttagttactttcaagacacaatggaagtataggcattgggtaaatactcccattccaaagggaagaaataggctgaaggaaataagatacaggccccatgaaagtctgaaaccttgcagcacagtctttaaaatttaaagctccgaaataatctcctttgaccccatatctcatattcagggcacactgatgtaaggcttaggcttccaaggttctgggcatcacaggaacattccaagagagtcacaaaagaatttgtagtgtggcttttgatgctaaacagtgtattagaccgagtaagtcactgaagagaaaaaagtcagaggagaagatgggtgagggtgacagaaatggaatggtgaaaggaaagttctgacaaaaatgtttatcggctgggcatggtggctcacgcctgtaatcccagcactttgggaggccgaggtgggcagatcacgaggtcaggagtttgagaccagcctgaccaacatggtgaaaccccatctctactaaaaatacaaaaattagccagatgtggtggcacacacctgtaatcccagctactcaggaggctaaagggaggagaatcacttgaacttgggatgtggaggttgcagtgagctgagatcacagcattgcactccagcctgggtgacagagtgagactccatcccaaaaaaaaaacaaaagtttacccaggggctcatctggtaccttgctctgtgactaatatcttacacattttgatttactcttccactttcattttctgatgcgcaaagtgtcacccttctgctgaagatgagaaaagaggctgagggagccaaatgagtggtctagagtcatccagctacttcatagagtttgtgtcttttaccttgacgtttgtgcacagacagaaaagtgagacacagaaggaaggcaaagcaagtttttgttgtgggtgacatttatgaaagttacctgtgttggcagaataatggactcctaaaatgtttgcaccctagctctggaacctgtgcatttacttttcttggtaaaaacatggtgcagcggtgataaaattaaaatcttaagatgtggacgttgttctagattatctgggtgggcccattgtaatcagaagtgtccttgtaagtgacaaagaaaagcaggggggtcagtgtgagaatgatgagcctgtgagactccactggccaatgctgggtgtgagcatgcatcaaaagacaaaattacaactaatgtagttatagattttatttttcatttattatttgaggcagctctcactctacaaatatagtgacagccctccctgagctatacaataacaaaacagtgggttttgtcaagtgggaaccagtaaacaaagccatataaataaataaattggtgaacattagggtacttcaggtctcttttctgtaaaagttaaagcagaggaaacttttattatgctatctcaggtagagtggaatctcctcttttcaacaaaaaacaaaggtctgttctggtatctctttgcttcattaaaatttcagttgtagactgtagcatttagcaggagtggttctattttggagtctctaggctctcacttaggtgagagtgtgaccaaaatttaaagcattggcattcatctcagtaaccatcatattgggcttccatcatttataagtttatgatgtcttcctgatcacacatttctttgagtttttgtcatttcagccaaagagagaccctttggtatttgttgatggctgcacacaaaactttttaaaaacttttgtagaattcaccacaccaaaatatagaattttaaaacctatagaatttatcacaccagagatgctactagtatgactatcaggaggataacaccaaaagtttggagtatgcactttaggcaagatgcaaaccaagtaaaatagaatagatcaaagaatgagccagaagagtctagcaattttaaccaagtagtatgtttggtaacttctgtgattgagtcattattatactcgatgtatttctttatgtgcaacagtcagtgtcagaaactgcacaggctcctccctgttcagctggtagggaacaattttattatgtagcattcgacggctcattaaattaaaacagggagtgagaacaagtgagtctgaaaatgtaactttaaaagggaccactgtacatttgaagaaacaagtgtgttaaagatgctgctaatgtcagccgttgggtggactaaatgatatcttatgtaaaaatttgagggtgacatgatatatctgtcactctgttacgctactctcagaagctacttcatgtgaaattctaatgataccatcatcgtgccacgtgaaagaggcaggcataagcatggacaaattaagagggctaagagcctgattttgatgtggagacttgttctgacaacttgggaaaagcttttgacagtgtgaagttgtcaacttcttatcctggttttaagtttgagtgtctgtagttatggtgtcaaacatattggtgagctctgagtgactcatacctcaggcacgagggttttcccgtgaaatttacattgagctttccacctccaacttatagggcttcaggaacaaagcagattttgttcttactgattcaataagagaaaactggatgggaggaaatagaagaattcagggtctagtccagtctaccggtgaataataaaaactcaaaaacaatgaacagagctgcaatttcatagcaggtatactacactttttattttcaacattatttttctctctataggcatatctatttttaccaaagagaatcccagtaggacaaattcgtttccaaagtaggtttagtcttatcagactttgccgggattctttacataagtgcatcaagagtaacaatggaccacagaggctcttcctaaagtttgcttccctagaagtttttataaggagtctcagattaaacttttacaagcctcttgagatgaggaagccaaatgaaggccatcttcagcctttgcatgcagtacttatgggtccattctatgtatattctcaaatataacatcttagtcaaagccttggtaatataaccaatgttttgaaacgtgtccttttgtaaagagagaagactcttactaaacttgtgcaaataactgtattagcataatcatatgaatactcatgaatagtttcccaatcctgggacagttaggaaaagagcaaaaataaatgggcttcaattattgtttccaaaagtatactttaccaaattgctttagatatagatagcttaaaagaagaaaaattccataaatctggaaaaaatcatttaaagaatcagcaaattttcaaataaaaattataaaaacattatccacattatcatttatttcaatgaaattatatttgttctgcttggtctcagtgggcatatttcatgaaggcatcaacctgtttgttaaagttttggaagtctatagacagtccagtgatataaccttgaactgctcagaaacttgtatgcaagagtacttgtcagtatcttttccataaatcttttgaaatagaagcaattttggactgtagctgattgcagatgctttcaggaagaatcaaaacaactatctgtgaattaccaacatgtaaaatgactattgctaaaactctgataagagtttggtataataaagagagtaactctggccagtacaccagtcatgatgctgacagtggccccaactgagagaccaaaagaactttcttgtcctgaagcagctgtcatggaaaaaaaaaaaaaaaagaagagaaggaataaattataaagacagcaagggttttagccaattattttttgagatagggtctcactctgttgcctaggctggagtgcagtggtgcaatctcagctcactgcaacctgtgcctcccaggctcaagcagtccccccacctcactctcctgagtagctgggactacaggcacacaccaccatgtatgcttaatgtttgtattttttgtagagatgggcttttaccatgttgttgaggcttgttttgaactcctggactcaagttatccacccgccttggcttcccaaagtgcagggattacaggtgtgagccaccgctcctgctggtttcatgctttttataataagaatgaactccttatgtaataataaataaaaagaaattatttgctttggatgtagcaaatgtagattgaccagagtcaggagctaagcctcatattttttttggctttagctcagtgtagagtgcattgaaggtgtcccaaaaataattccatatagtaagccaactttaaaccctgctcacagccagatctgccaagtatgagccaggtaaaattaccaaaaagggtggttctgactgactccttaacaataatgtggcttacaaacaaagactgatatgaaatagtcgatccaacccaaacactttgctcatttcccaaaattttctatacaaacatatacaacttatcacaacataaagaacataatgaaaggtttgccttttattcgtttaaatgaccatatgtttagatctgatgtactgacagcgataattctccattaagcagaaacctaataaaatttgaaaaatagtgattttatctttagatgatactcagatcttctgctacatatgtggaaaatggaattattgctagaaacattgtttaaagattagggtatgaaaggagtattaggaagtcaggaggttctttctttaggaagcagcttatctggattcattcaaagagctttatgcgagtttgaggtctttctgcaaaatgtaaattgctatctgagaaaccatatatagtccaatgatgaaagaatgcaaagccttagaagcaccggagacaattccagtatcttccctaaagttctgacaaaaaggaaaataactatcaaattattcaactcgaatgcttattatgtatgtataagtcagttggcagacgaagagaggagggaaatatgacttctacccctagggaacacatagtcttgtggggccactaggggtggtggtgtgacctgcctggagcagcgctaaatatggacttgtgagtgaagggctatcaaaacctaagtaaactgattgccgttcagagaaggtagagttccattccacagtttgcaagaaggactatttcatggaggaggtcatgttggactagaccttaaaaagttggtagaatttaaaagcaaggatatggaagcaggaagagtgaaagtgagcagaggtacagaagtgaggcaaggctgagcagtgttaattttttaatggtggtattataaaacacacatcaaaatttgccatattattattattattttgtagacagtgtctggctctgttgcccaggctggagtgcagtagctcaatcatggctcactgtagcctccacctcctgggctcaagcaatcctcgtacctcagcctgctgagtagctgggaccacaagcatataccaccatgcccagctaatttttatatttttgggagtgacgagttcttcctatgttgcccaggctggtctcgcactcctggactcaaatgatccacctgccttagctccaaagtgctgggactacaggtatgagccactgcacctgaccccatcttaaaaatttttaagtgcaccgtttagaaatacatttgcattatgcaaccatcagcgccacccatcttcagagagtatttttcatcttgtaacagggaaaattcatatccatgaaacactaactcctcattcttcctcctccccaccccaggtaacaactatttcagtgtctctatgattttgactgctctagggacttctataaatgagatcatacactgtgtatctttttgtgacttagcataatgtcctcaaggttcattcatgttgtaatatatgtgagaatttttttccttttgaaggctgaataatatttcactgtatggatagaccacattttgtttatccattcatctatccatggacaattgggttgccttcactttttggctattgtaaataatgctgctataaacattgaggtaccaaaacctgtttgggtctctgctctcaattattttgggtttatacccaggagtggaatggccaggtcatacagtacctctagttttagttttctgaggaaccgccataatgtttttcacagtggttgcaccattttaattcttatgaatagtgcacaggggttccaattgttccacagtctcattaacacttattattttctggggtttttgctttgtgtttgggagtagccatttaaattggcataaggtataatttcattgtggtttgcattttcatttccttaatgattagtgatattgatcaatattttatatgcttgctggccatttgtacatcttctttggagaaatgggagggacagatccctcccattgaatagattaatgtcctctcctgatggtgaatgaattcttcctctattagttcctgcaagacctggttgttaaaagagcaggccaccgccccggtttctctcttgctcccttgctcatgtaatctctgcacatgttggcttcccctcctcttctgcgatgagtgggagcaggctgtggccatcaccagatgaagatgcccaattttgaactttccagccaccagaatcataagccaaatcatcccttttcctttataaattatccagcctcaggtattctttatagcaacacaaaagggacaaggactttttatatcttgccccactgtcttctagcatttcatgtgtcacataaagaaatcttagcctcctaggttttttttttctgaatatccacagaattctttccataacttcaaataccaggaatttattggggtatttgttaattattcaatataaacacagccttgtaattcttgggctatttctgtctgcagattcaaatttcactgtatttcaggaatttcaccttgaattgtatctttgaaaatttgttttcatgttccattcattttttaacccatgcaaggcatttggtgttaatgatatttgatctcttccctaccacccctcccatccccctctttttctctatctctgtcttccgtcttttactttttgttcttttccatctcacatgctcattttttcttctcaaaaccatcctttgaattccttcagtggtgtctcatctcccttttgctgcttctatcatgacctttgattttagtctctttttgtgtgtctctctctgagattctgaggctctgcctattctgtttttattctcatttgtttctaatttgtttccaagactctgtctactcccttttcattctcatttattactaatttatttctgaggctttacccacccacttttcattcccgtctaacctaatgtattatcagttcttccttaaagccttatattgcttctttaaattctcatttcagagaaacaatattgtctttaattgattccttagaaataactttgttcatggtttttggctgcgttgtggtatataatctttctgtttctcatcttcataaatcatgttctgttcttcttttttcatttcagcatcattttaaaggcccccggctggctccaccctttttaagtagcattgttcctcatctttttggactagaattttgggcaaagttctggtgaaaggggaagaggaatgtgctaaacaaatgggaagattgggtttcaatctgttatctctaggatgtttctcagctggacttggcctgtgggttatctggtccagcatagcaggacatcttccaggctcacaaggaggttgtgcattttacagaacattttaatgtgattattttaccttcacttatcttcaccaggcagctttgggcaaagacggccaggtagcttttatcttattgactcttccttctatcctataccatgattgaaacatgatgtaggcttccaaaaccaggccatgaaccttgatcttaactttctaagcatgggatagacacatttcctttcaatgtgtgccacccatccactttggataactatgagctgggtcaactgtgcctgagtcacacatagaaagacaccttctcttggagttcccaaatacctccatccacttctcatacacttggctgtcttcctgcatctacagtgatccagtgttataggggatctgtagcttcatcaaagataacatttgtttgtttctccttctcttgtttgctttggattggtttcataaaggaaatgagacgaaaatatacttatactacgattttaaaagaaaagataaattccttctttcaaattcattcctttttgtttctttccaatgaatctcatggggtgaggggaggactgaagagaatgtccaatctactcaaatccaaaaagtcacaggtataaggcacagaaaattttaccagtctaatgatggcagttttaatgctatataaggacagactatgcaaaaatgctattaatgaggatgaggagctacaggaacaaacctgatgaggaactgtaattctattagagggatgtatatagccatcatttttttctttaatccaaaacaattagattgcttatgtagacagccacatgctatttgattgaaatgcaccagaggatgcagatatatatatatatccttttaccttaatttccattttattctttctctcccttttttttcatttattattatactttaagttttagggtacatgtgcacattgtgcaggttagttacatatgtatacatgtgccatgctggtgcactgcacccactaactcgtcatctagcattaggtatatctcccagtactatccctcccccctccccccaccccacaacagtccccagagtgtgatgttccccttcctgtgtccatgtgatctcatttttcaattcccacctatgagtgagaataggcagtgtttggttttttgttcttgcgacagtttactgagaatgatgatttccaatttcatccatgtccctgcaaaggacatgaactcatcattttttatggctgcatagtattccatggtgtatatgtgccacattttcttaattcagtctatcattgttggacatttgggttggctccaagtctttgctattgtgaatagtgccacaataaacatacgtgtgcatgtgaatttatagcagcatgatttatagtcctttgggtatatacccagtaatgggatggctgggtcaaatggtatttctagttctagatccctgaggaatcccacactgacttccacaatggttgaactagtttacagtcccaccaacagtgtaaaagtgttcctatttctacacatcctctcctgcacctgttgtttcctgactttttaatgattgccattctaactggtgtgagatggtatctcattgtggttttgatttgcatttctctgatggccaatgatgatgagcattttttcatgtgttttttggctgcataaatgtcttctgttgagaagtgtctgttcatgtcctttgcccactttttgatggggttgttttttttttcttgtaaatttgtttgagttcattgtagattctggatatcagccctttgtcagatgagtaggttgtgaaaattttctcccattttgtaggttgcctgttcactctgatggtagtttcttttgctgtgcagaagctctttagtttaattagatcccatttgtcaattttggcttttgttgccattgcttttggtgttttagacatgaagtccttgcccatgcctatgtcctgaatggtattgcctaggttttcttctagggtttttacagttttaggtctaacgtttaagtctttaatccatcttgaattgatttttgtataaggtgtaaggaagggatccagtttcagctttctacatatggctagccagttttcccagcaccatttattaaatagggaatcctttccccattgcttgtttttctcaggtttgtcaaagatcagatagttgtagatatgcggcattatttctgagggctctgttctgttccattgatctatacctctgttttggtaccagtaccatgctgttttggttactgtagccttgtagtatagtttgaagtcaggtagtgtgatgcctccagctttgttcttttggcttaggattgacttggcgatgtgggctcttttttggttccatatgaactttaaagtagttttttccaattctgtgaagaaagtcattggtagcttgatggggatggcattgaatctgtcaattaccttggacagtatggccattttcatgatattgattcttcctacccatgaccatggaatgttcttccatttgtttgtatcctcttttatttccttgagcagtggcttgtagttctccttgaagaggtccttcacatcccttgtaagttggattcctaggtattttattctctttgaagcaattgtgaatgggagttcactcatgatttggctctctgtttgtctgttgttggtgtataagaatgcttgtgatttttgtacattgattttgtatcctgagactttgctgaagttgcttatcagcttaaggagattttgggctgagacaatggggttttctagatatacaatcattccatctgcaaagagggacaatttgacttcctcttttcctaattgaatgccctttatttccttctcctgcctaattgccctggccagaacttccaacactatgttgaatagtagtggtgagagagtgcatccctgtcttgtgccagttttcaaagggaatgcttccagtttttgcccattcagtatgatattggctgtgggtttgtcatagatagctcttattattttgaaatacatcccatcaatacctaatttattgagagtttttagcatgaagcgttgttgaattttgtcaaaggccttttctgcatctattgagataatcatgtggtttttgtctttggctctgtctatatgctggattacatctattgatttgtgtatattgaaccagccttgcatcccagggatgaagcccacttgatcatggtggataagctttttgatgtgctgctggattctttttgccagtattttattgaggatttttgcatcaatgttcatcaaggatattggtctaaaattctctttttttgttgtgcctctgccaggctttggtatcagaatgatgctggcctcataaaatgagttagggaggattccctctttttctattggttgaataatttcagaaggaatggtaccacttcctccttgtacctctggtagaattcggctgtgaattcatctggtcctggaccctttttggttggtaagctattgattattgccacaatttcagctcctgttattggtctatatagagattcaacttcttcctggtttagtcttggaatagagtatgtgtcgaggaatttatccatttcttctagattttctagtttatttgcatagaggtgtttgtagtattctctgatggtagtttgtatttctgtgggatcggtggtgatatcccctttatcattttttattgtgtctatttgattcttctctctttttttctttattagtcttgctagcggtctatctattttgttgatcctttcaaaaaaccagctcctggattcattaattttttgaagggttttttgtgtctctatttccttcagttctgctctgattttagttatttcttgcctcctgctagcttttgaatgtgtttgctcttgcttttctagttcttttaattgtgatgttagggtgtcaattttggatctttcctgctttctcctgtgggcatttagtgctataaatttccctctacacactgctttgaatgcatcccagagattctggtatgttgtgtctttgttctcgttggtttcaaagaacatctttatttctgccttcattttgttatgtacccagtagtcattcaggagcaggttgttcagtttccatgtagttgagcggttttgagtgagattcttaatcctgagttctagtttgattgcactgtggtctgagagatagtttgttataatttctgttcttttacatttgctgaggagagctttacttccaagtatgttgtcaattttggaataggtgtggtgtggtgctgaaaaaaatgtatattctgttgatttggggtggagagttctgtagatgtctattaggtccacttggtgcagagctgagttcaattcctgggtatccttaactttctgtctcattgatctgtctaatgttgacagtggggtgtaaagtctcccattattaatgtgtggtagtctaagtctctttgtaggtcactcaggacttgctttatgaatctggatgctcctgtattgggtgcatatatatttaggatagttagctgttcttgttgaattgatccctttaccattatgtaatggccttctttgtctcttttgatctttgttggtttaaagtctgttttataagagactaggactgcaacccctgcctttttttgttttccatttgcttggtagatcttcctccatccttttattttgagcctatgtgtgtctctgcacgtgagatgggtttcctgaatacagcacactgatgggtcttgactctttatccaatttaccagtctgtgtcttttaattggagaatttagtccatttacatttaaagttaatattgttatgtgtgaacttgatcctgtcatgatgatgttagctggttatttttctcattagttgatgcagtttcttcctagtctcgatggtctttacattttggcatgattttgcagcggctggtactggttgttcctttccatgtttagcacttccttcaggagctcttttagggcaggtctggtggtgacaaaatctctcagcatttgcttgtctgtaaagtattttatttctccttcacttatgaagcttagtttggctggatatgaaattctgggttgaaaattcttttctttaagaatgttgcatattggcccccactctcttctggcttgtagggtttctgctgagagatctgctgttagtctgatgggcttccctttgagggtaacccaacctttctctctggctgcccttaacattttttccttcttttgaactttggtgaatctgacaattatgtgtcttggagttgctcttctcgaggagtatctttgtggcgttctctgtatttcctgaatctgaacgttggcctgccttgctagattggggaatttctcctggataatatcctgcagagtgttttccaacttggttccattctccccatcactttcaggtacaccaatcagacgtagatttggacttttcacatagtcccatatttcttggaggctttgttcatttctttttattcttttttctctaaacttcccttctcgcttcatttcattcatttcatcttccattgctgataccctttcttccagttgatcgcattggctcctgaggcttctgcattcttcacgtagttctcaagccttggttttcagctccatcagctcctttaagcacttctctgtattggttattctagttatacattcttctaaatttttttcaaagttttcaacttctttgcctgttgaaacttttttcaaagttttcaacttctttgaatgtcctcccgtagctcagagtaatttgatcgtctgaagtcttcttctctcagctcgtcaaagtcgttctctgtccagctttgttccgttgctggtgaggaactacgttcctttggaggaggagaggcgctctgctttttagagtttccagtttttctgttctgttttttccccatctttgtggttttatctatttttggtctttgatgatggtgatgtacagttgggtttttggtgtggatgtcctttctgttagttagttttccttctaacagacaggaccctcagctgcaggtctgttggagtaccctgccacgtgaggtgtcagtgtgcccctgctggggggtgcctcccagttaggctgcttgggggtcaggggtcagggacccacttgaggaggcagtctgcccattctcagatctccagctgcgtactggaagaaccactgctctcttcaaagctgtcagacagggacatttaagtctgcagaggttactgctgtctttttgtttgtctgtgccctgcccccagaggtggagcctacagaggcaggcaggcctccttgagctatggtgggctccacccagttccctcttccaggctgctttgtttacctaagcaagcctgggcaatggagggcgcccctcccccagcctcgctgccgccttgcagtttgatctcagactgctgtgctagcaatcagcgagactctgtgggcataggaccctccgaaccaggtgtgggatataatctcgtggtgcgcccttttttaagcccgtcggaaaagcccagtattcgggtaggagtgacccgattttccaggtgccatctgtcacccctttctttgactaggaaagggaactccctgaccccttgtgcttcctgagtgaggcaatgcctcaccctgattcggctcgtgcacggtgcatgcacccactgtcctgcgcccactgtcttgcactccctagtgagatgaacccggtacctcagatggaaatgcagacatcacccatcttctgtgtcactcacgctgggaactgtagaccagagctgttcctattcggccatcttggctccttccccagttgttttttttttaatctgtaaaaacggggatggtggcacttgggatttttttttttttttttttttgagacggagtctcgctgtgtctcccaggttggagtgcagtggcgcgatctcggctcactgcaagctccgcctcccaggttcatgccattctcctgcctcagcctcccaagtagctgggactacaggcgcccgccaacacgcccggctaattttttgtatttttagtagaaacggggtttcaccgtgttagccaagatggtctcgatctcctgacctagtgatccgcccgtctcggcctcccaaagtgctaggattacaggcatgagccaccgcgcccggcccgcacttgggattttttggtgaggactgtagttacctggaaaggccttaggatagtgcctggtacatagtgagtgctgcatcagtgtgagctattataattatgggaatagacaaaggtgccaccctggccatccagagtggggaggtattttccagtcagggtccaggcaggccagctggagatgaagctgattagtggggaagcttaacttccaggagtggaagaatttaggaggagtaaacagaatgcacaacattctgtaaacattcctttacccaacagtaggaatgctcatagtgggtgtggcttccgtgacaatcattatctcttgggaatttaagaatgtgtcctagagtcaaatggctttgatgtaagccaaacccagaaatgggcttcaggtctgccttacacatagcattcattcatcttgaaaaaggaaagcattcatcttgctaaaggaatcccctcttctggcccaggtcattatttttgtttttgtactgtcctaatttttaaggtgtaaggagaaagaccaaagaataaaataatgaagtacatgtatgaaataacagggtagaattgagactggtacgtgtaagttaagagaaattgtgtataaattttgtgtgaatagaaaaaggatttcttgttgcaaacagacctctctatataaataatacccattgccttcagtggatagcagactgcatcacaagaacattccagcagagtcacgagagaatgggtagtgtggcttctgtaattggcaggttagacagagtaagttactgaagagaaaggagttgaaggagaagatgggtgagggcaagaaaaatgggaaggtgaaaggaaagaactgaaaggaatgtttaccaagggctcatcaggtaccaggctctgtgattaatgtctcacacatgttaatttactcttccactgtcattttctgatgcagtaagagtcagtcttacactgcagatgaggaaagaggctgaaggaggtcaaacgagtggcccagggtcatccagccacttcatagcagagctagtgtgtttcactgtggtttgcgcagacagaaaagtgagacatggaaggaaggcaaaacatttttcttgtcggtgatgtttatgaaagtgacctgtatgaggcagaataatggcctcttaaaaatgtccacatccaggtcgggtgcggtggctcacgcctgtaatcccagcactttgggaggctgagatgggcagaccacgaggtcaggagttcgagaccagcctggccaacatggtgaaaccccgtttctactaaaaatgcaaaaattagctgggtgtggtggcgggcgcctgtaatgccagctacttgggaggctgaggcaggaaagtcatttgaacctgcgaggcggagattgcagtgagcccagattgtcccactgtactccagccggggcaacatgagtgaaactctgtctcaaaaaaaaaaaaaaaatccacatcctaactcttggaacacatttacttggaatgcatttacttttcttggcaaaaacactgttcaaagttgatgaagttgagtattttgagatggaaagcttattctggcttatctgggtggctccctgtatcatcataagggtccttgtgagtgaaagaggaaggcaggagggtcagggtgagaatgatgcagtctgagagactccactggccattgcttcctgtgaacatgtgtgataagacaaaattacaactaatttagttatagatgtaattggcttttatttgtgatttatgatttggggcagctctccctctacagatgcttcagcatcccaagtagctgggactatattgcaggatctggccagcagcctgcaatgcaacggggctctttctttgttcccaggcagattggcaggttgagaaataaaagacacacacaagatagtgaaagctgggtccagaggggtcactgccttctggtcctgcgatgctgccaatgcactggatataccagcatttattattaagtttagtgagagtgggggtaggttagtgagggatttagggtcatttataggctctccgtaagggtcacattccattcccagagctatggacatctgcttttctgggataggaatcttggtaatgtgaaacctccctgactgcatgtccgttcataggctctctgcagggggaagcacatcacgtgctgttggctcattctggcagtccaacctggcatttgtctttacacaatcctgcatgcaactttgtatttacaataatcaggagcatttcatctttcattccgtagcaatagttcaggggttctccctacatctctgcttttctctgatttaaatgaaccatagcaatcatagcttggcactgatcacaattggattgaagaacattttttccaattttacacatgaacaataaaccaacagcacaaattatacacagaacaaaattaacgatagtggatcctcccaaagattttacctattgaatggggttgagattagataacccctcagagatactgtctaaaacttcagcactgggtaaagcagttaagtgtgcttgagaagcttcaaaaatctgttctttcagcttgcttatgtctaaacttaaattatcttcacttccttgtaaatggcatattactgattcccgattgtgaccagactctttatattggaacagagttttacaaaaatcagaagtgttccaatcaggttgcatttgtaatctatgttctaaactcataattctatctcccatccatgtaacagaagcacatcccgtgctgtaggctcattctcgcagcccaacctgtcattgtgtttacacaatcctgcgtgcaattttgtatttacaataatcaagagcatttcatcttttattctgtagcagtagtttctgggggtctccctacaggactgcaggtgcacgccaccatgcctggctaatttttgtatttttagtagagacagggtttcaccatattgatcaggctgatcttgaactcctgaccttgtgatctgcctgccttggcctcccaaagtgctgggattacagatgtgagccactgcacccagcccataaatcacacatttctttgagtttttgtaattccagcacaagagaaaccgtttgatatttgaagaatggctgcacacaaatatttgcacagaaataaaaacatctgtagattccaccacatgagggagaataccagtatgactatcaggaggaaaatatcaagagtttggaatatgcaccttaggcaagatgcaaaccaactacaataggatagatcaaagaagaagccagaagagtctagtcattttaaccaggcagcacatttattgatttttacaactgagtctctataatacccgatgtatttatccatgtgcaacaagaagtgtcagaaactgcacagactccccgctgtccagctggtagagaacaattctattatctagcattgcatgtctatgttaaattaaaacagggagtgagaataggcaagtatagaagtggaagcctaaaaaaaactccatacatttgaggaaaaagttgtgttacagatgcagctaacgtcagcctttgtgtggactaaaggatgtcttgttatgtaaaaatgtgtgggctgggtgcggtggctcatgcctgtaatcccagcactttgggaggctgaggcatgcagatcatctgaggtcaggagttcgagaacagcctgaccaacatggagaaatcctgtctctactgaaaatacaaaattagctgggcatggtggtgcatgcctgtaatcccagctactggggaggctgaagcaggagaatcacttgaacccaggaggtggaggttgctgtgagccaagattgtgccattgcactccagcatgggcaacaagagcgaaactccatcttaaaaaaaaaaaaacgaagtgtggttgacatgatatatctgacactgttaacttactctcagaggctatttctggtgaaatcctaagtacagcattattctgggaagcaaaggagacaggcaaaagcaaagacaaattaagagaggtaagagtctcatcatgactgatagtcttgttctgacatcttgagaaaagctgtccacagtgtaaagtcatcagcttgtcgtggtttgcagtttgagtgtctctaagttatggtgttgaacatttggtgagctcttagtggcccccacctcaaacacgagggttttcccatgaaatttacattgagttgtccacctccaccttatatggcttcaggaacagagccgctcttgttcttaatgatttcattggagaaaactgaattggaagaactaaaagaattcagggtccagtccagtctaccagtggattataaatactcaaagataatgaacagtggttcaatctggtaacaggtgtactacagtttttcttttcagctagtttttctctctatcggagtctctatttttaccaaagataattccaataagatgaatttgcttgcaaaataggttgagtctcaccgaacttgcccagattttttacctaagtgcggcaagagtagcaatggaccatagaggctctttttaaacttctctttgctagaagtttttaataagaatctcagatgaaacttccaaaaacctcttgagactaggaagccaaaccaaggcccacttcagactttgcctgcattccctatgggtttattctatgtatattctcaaatataacatcccagtcaaagccttggtaatataaccaatgttttcaaatgtgtcctgttataaagagagcagattcttacggaacatgtgcaaataactttattaccataaacctatgaatactcatgaatagtttcacaattctggggcattcagatagacagcaaaagcaaatatttcaatttttgtttacaaaagtatactttaccaattgctgaagaaaaaaagttcataaatctggagaataaaacattcaaagaatcagcacattttccaataaaaaattatgaaaacattatccttttgattatttagtccaataacattgagtttttttcttctttgtcttgaatttcatgaaggtatcagcctgttctttttctcagtgtctcagttgttgcagtcatgactgagactctgtcaggtctccatggcagggacctgattgacagaaggcccaggtcagtgcatttcaaattcactacctcctttacacagaaagcttctttcctacaggctcccaggaagggtgtgaaagcaagcctagttctctgaggctctatttaactctaatgggtggctggttggaggattccccatcagccttgcaaatactcttagaactgcattggtacctaaaacttctttctctttctttttcacaggaatcagctctgcatagtgttctgtgggttctcccatactaccttcatgcctgctccacattccctcacaggtgtcttccctgataaattaccttgtatgtctaatcccatcttggatgcatctcagttggtaaaaactaacataccagacttgattctttgcccttagctttttttttctctcccacaagtagtcagtaaccatgtcctagtgttttatgtgttacctctttttccatatatatggaaaaaggtaggtactgttgaggtgcacttcctatgtgccaggccctgtgctcaatactttacctgtatctcatttaagccacacaataaccctgtcacatagacattatttccattttgccgatgaaaagacagaagcttagcatggtgtaaaaactttcctggtgtcatatggctagtgacaggtggatctgagatttgattctaggactatttgacctcaaggctaatgatgatggtagtaatatagcagctgacattggttccgctgtgtgtggcatattgtttcattgactgcattaaacctttaaaacaatggtaagaagaaagtactctcattgcaattttcaggtaaggaatcagaggttcagagaagttgagtcttgtgcaagaaatttataactgtaaactcttacattaaaaaagaagaaagatctcaggtcaacaacctactttaatacttcaggatatgaaagaagaacaaactaaacccaagcacagtgaatgagggaaataataaagattagagtggatatacataaaatggagaatggaaacagaatagaggaaattaatgaaaccaaaagttgattcttcaaaataaaatcaacaaaattgacaaccattaactagattgactaagaaaaaaagagaaaagtttaaaattactcaaatcagaaatgaaaatggactctgagcatggtgggtcatgttttaatcctagcactttgggaggtcacagcagaaggatttcttgagaccaggtgtttggaccagcataggtaacctggggagatgctgtctctacaaaaaaataaaaaaaaattagctgggcatggtgacatgcacctgtagtcctagcatcttgggaggctgaagaaggagaattgcttgagcccaggaggttaaggctgcagtgagccgtaatcacaccactgtattccatcctgggctggcctacagagtgagagcctgtctctctctcttccaaaaaaaaaaaaaaagaaagaaagaaagaaaaatgaagcgattactaccaattctaataaaataatgatgatgaaagtactataaataattgtatgccaataaattggataacctagatgaaatggaccaactcctagaaccacacaaaaatatgagtataactataatcagtaataagattgaatcaataaaagcatttgatgaattcaatattttttcataatgaaaacatcctaagaatggaaggaaaccacctcaacataaaggcaatatgtgaaaaacccaatgctagcatcatactcaatggagaaagactgaaagctttccctgtatgagcagtaacaagacaaggatgcctgcttttgacacttttattcaacgtagtattgaaaggtctagtcagaaaaattaggcaagaattgaaaaaaagacattcaaattggaaggaaggagtaaaattatttctgtttatagataacttgaacttatatgtagaaaatcctaaagattgaacaaacctaattagaattaataaataaattcagtaatgttgcacaatacaaaatcaacattcaaacatctgttgtatttcaatacactaaccatgaacaatctgaagggaaattaagaaaaaaatttcaatttatattaacatcaaaaagaataaaatatttaggaataagtttaatcaaagaggtgaaatgattatacctgaaatctacaaaatattgctgaaagaaatgaaagatgacatcaataaattgaaagacattttgttttcatgaattggaagactcaatattgttaggagaacagtgctacccaaagtgactgcagattcaatacaattcctatcagattctcagtggcatttttgcagaaaaagaaaaatctgtcctaaaatttatattgtatctcatgactctaaatagacacacagctttgaagaggaagaatgaagctggaggactcacacttcctgatttcagcatttacaatggggaagggacagtgttctcaccaaaggatattgggaaagctggatatccaagggcaagaagattggaacctttacctaacaccatgtacaaaaattaacccacaatagatcaaagatctaaatgtaagagaaaaactacacaactcttagaagaaaagcttcatgatactggatttcccaatgatttcttggttgtaacaacaaaagcataggcaacaaataaaatggataaatcggacttcacaaaaatcaaagcttttatatgtcgaagaacattatcaagaaagtaaaaaggcaacccacgaaatgataaaaatatttgcaaattatatgtgtgataagaaattcatttccagaatacatgaaaagctacaagtcaacaacaacaaacatccaaaaacccaattaaaaaatgaacaaaggattaaaatagagttttatccaagggagatatacaaatatccaataagcccatgcaaagttcctcagcatcacgaatacctggagatatgcaaatcaaacccacaatgctacaccacctcacacaatttaggatggctttgataaacaacaacaatgacaacaacacaaaacaacaggtgtttgcaagtagatggaaaaattggagctctagtgcattgctgatgggaatgggaaatgttatagccactgtaaaaagtggtgtggctgtttctcaaaaaattaaacaataaattaccatttgatccagcaattccacttctggacatactccccatagaattgaaagaaatttgaacaaatatttgtacactgatgttcagagaagcattactcacactagcgaaaaaatggaaacaactgaaaagtccattgaaagataagtgggtaggcaaatgaggtgtatctatacattgaaatgttattcaaccttaacaaggaataaaattccaatacatcatgcaaaatggatgaaccttgaagatattatgctaactgaaataaaccagacacaaaaggataattattatgtaattccatttataaaagatagttagaatagccagttacatagagacaaagtagaatgatgggtgctaagggttaggggaagaaggagtgagagttactgtttattgggtacagaggtttaatatggtaagaggaaaaagttctggaaatggatagtgtgatggttacacaacactaaattgcacacatagaaatagttaatggtaagtcttatattagatatatataaagtgtctggtagtcttaccctctctataattacacactttttggcactgcccctttcctgccatgaataaccccaacggtgaatctccctattcctccagctctgcatcagtcactgtcctccgtgctgtgtcccacgtgctgtgcccaaagcctcatacagctggtgacttcagagccaggacgcagctcaggagtctgccctgaggctccctctcttcttatttccctgcagcctggcccgggggaggcttggcttcaactggcagctcaatttagccaaattcaggacaggccaccagggccctttctacacacacgctagtcccaccccaggttgagtgaggcagggccagtcaccagaggagcccggagcagagcaggaagcagagtctgagctgctcctccctcacccaaggggcttcctcctctcatctgggggaaaagtgtgagcttgtttcaaagcctcagctgtcccttgtagctcatggaataggtacaagaaaaaaaagacgtggcagaaggggatgtgtcggtgacagcgagaagcaacttgatcttgaggactctccttcttgtccctctctgaagcctcttctaccacatagggctcagggctgataaagccccctccctacctttttcaggccagacacaaggtcagccataagaaaacagaaaaacaaggagaagagagtctgtagagacaaattgggagggttcaggaggagaatttgggatttgcttgtgcccatgggacacaggctgggaataaaaatgttttcctgactcttctctgaaagccagatagactccacataaaaccctactgccaaggatgctgggatccacttaccagagactttgactgtcatggatttggagatttccttgccagtggctgagttatgaacagagcaagcatagagcccgctatgatttctagtaatttgggggataaagagcttttgtcctgattgctgaaacttcccattaattgtccaaaaatactctgccggtgggttagattccgtgaagcaggacaagtcgaggttttctcctgaacggtaataggtgaatgaagggtaaattctggggaggtctggaccatctggaggaaagagaataaagccacacgtgatgtcattcgagggaaggggatgttcctggtctcttaaagggacacagtgaccctctgagccaagacacaccctcaagtcccagccaaagtccctctatgttcactgagctgaagcctgaggtattcacctgtttctcccatcacaagctgtgggccccaagtctcccatgacaagagcatccactccccttatattcttggttaaggctgtgcctacccaggttttcccagggcagggagtcatggccacctcggatgtctagaagtaaaggtgtctatacttggaccggagagagactgagaggcctggcatctggtcgtttggacttaagctggtgtcctggcccacagaggaacaaaagatactcacagaggacatttaggatgactgggttactgcggaggccaccatatcggtcccgtatttcacattgatagggtcctgtttcatttctcgtgacactgggtagaatgagtatcctgttttcaatgggtcgctttaccccgggactgacggggaggctctgaccgtttagccaccaaatgtaggtgtagttctcactcttaggttcacaggtgaaggctaagacatccttattctccctggggtttaagttgttgatggtgatgtaggggatgggcagcttcgctgtgtggataacagagagaagattgtcctgtgtggcacctttgattcctccacaggcatacttcaatcagagttggcatctcccacctctcagcccacccgagtccttgaaagccaatagctggtgcgtgtgtcacaagacagatgcatgatgatctaagggctcaaagactgtgaggccgcctgctctgtcttagggaagcacagactttctcaagtgtcaattgagcagcagtgttgggtcatggacagacacatcagtgggagtcacagcccctggtacccctcccagtccctccctaatcagttgactggctggctcaccttgggttccttacctggaatgtgcaactgctgggccccttccaaattccatcctactttgcccccctatatgtgatttctctgcagcttccatttctaaggatgttctagagatgagtaataatgggacttcccattgtcctgagaccctgaagatacttagcagcctggcctgggactggatgtttcagcagaaataacacagaggagaccagagtcaagcctggaggtcagttcagtcatcaggcagtggaggctcaaggtggggcagttttttgcaggtgtttcatgatgacttacttgaaccagtgacctctaaacatagagcagagtgcaaggaatgatctagaaagagtgaaggcgacaggcaagagctggtggctttggagcagaaccatgttctctgtcctgggttctttaagtttcctctccttctgcagagggcagaggaggaccatgtggatctttccagaaatacatgtggacatttgcaaatgcagaactgactggtggaaagtgtgggaatgaactgctggaaatctggtcctcatggaccatgtgtgtttgatggatatgagacaaacttggagagaagttttgcaaatattttctttcattggacattctactctctgatcccctgggttcgactactctagggacctcatgtaagtggattccagagtgaatatgagaagagactgctggttgccaggagctgggagtggggagaatcagaaattgttcatgggtgtgcagtttcagttatgcaaggtggggaggttctagagatctgctgtagagcttgatgcctatagttcacacagattgagtatttcttatgcataagtcttaggacaaaaagtgttttggatttctgacatttttttattctgaaatatttgtcatatacttactggtttagcatcccaaatctgaaagattcaaaatctaaaatgcttcagtgagcatttcttttcagcatcagattagtaggcaaaagtgggaggtgataagccaaagatattcttgccctttttttttctctcaccacttttctagcttgatgattagtttttggtcaattccatactggccatgctgcactcatatattttttaaagctttgggatgtgagaaaggctgattgctattttctttgtcatcagaactttccaccttttctggttgcatctttttctcagtgtttgtgttgtggcagtcattaataagatcctgtcaggtcagatttaggacagagttttctaattctgcaaaaaatgttactgggattctggtaggggttgcattgaatctgcaactcaattgggtagtattgtctttctaacaatattgattcttccaatccatgaaaatgaaatgtctttccatatattgatatcatctttaatttctttcagcaatgttttgtagttttcagggtataatcatttgacctttttggttaaacttattccaaaatattttattccttttgatgttaatgtgaattgaaatcctttccttaacttcctttcagattgttcattgttagtgtatagtctaaagaatgatctagaaagagtgaagggacaggcaaaagctggtggttttggagcagaaacatattccctatccagggttttttattttccctctccctttgcagagggcaggtggctgttccctgacagctagatagacttcactggaaaacatagtgccagtgctccagggacccacttaccagggactatgatcctcttgattatgagatttgttccaccagtggctgagttatggatgaaacagacatagaccctctatatgttttagtgatttgggggataaagaacacttgtgctgagtgctggaacttcccatcaatcagccaagaatgctctgccagtgggtgagagtctgtgaggcaggagagattggggaattcccctgtatggtaatagatgtatgaggaagaaatggtgggtgcatccaggccatgtggagcaaagagaataatgtcacaagcgatattgtcagagggaagggaaaatcctggtctgtggaagggccacagtgaccctgtgagccaagtcgcaacactgaagtcccagccaaatccctgctgtgttcactgatctggagcctgagacattcacctgtttctcccatcacaagctgtggacccagagtctcccatgacacagcagcctcttttctcccattgttgatcaagcctaggcctactctggtttgcttggggcagaaagtcatggccagctttgatgtctaggggtaaaggtctctgtacttggacctgagagggactgagaggcctggcctctggccatgtgtatttgggatggcagcctggctcacagaggaacagaagatactcacggaggagattcagggtgactgggtcactgcgactggcactcactgggttccgtatttcacattcatagggtcctgcaatatactttgtgacaccaaatagatagagggtcctgttggttttggacagctgcaacctgtgagtcacagggaggctctgaccattcatccaccataggtagcttgcgtccagagtctcaggatcacagattaagcgcacagcctccatggcctccctggggtttaagttgctgctggagatgtagggcttgggagtctccactgtgcagaaaacagagagaagattgccctgtgtggcacctttgattcctccaaaggcatttttcagtcagagttggcatttcccacctctcagcccaacccagtccttaaaagcccatggcaggtgtgtgtgttacaagacagatgcatggcaatctgagagctcagagattgtgaggctgcctgctttatgtgggagaagcacagactttcttaagtgtgaattgagcagcagcattgggtcatggaaagacacaggaccagcagtcacagcccctgatgcctctttgagtccctccgtctccaactgcctgactggcccaacttgtggtcctcacttggagcatgcagtgctggaatcctcttagtttcagtcttactttgccccctgaggtatgttttctctgcagcttcccttgccaaggacatcctagagatgggtgatggaacttcccattgtccttaaaccctttgggtattggaaagcctggtctgggactgggtacttcagcagaaataacacaggggagaccagagtcaagccgggaggtcagttaagacatcaggcagtggagccacaaggtggggcagtttgcagttttcccaggtgtctcatagtgactgacttgagccagtgacctctaacgatagagcagagtccaaggaatgacctacaaagagtgaaggggccaggcagtagctgatagctttcgaccaagaccatgttccctgttctgggtccatgatgctcccttccccctgtagagggcaggtgaggaccatgtggatctttctagaaatacatgtggatgtttgcaaatgcagaactgactggtggaaagggtgaacatgaacagatgatggaagtctggccctcaaggaccatatgcgtttggtggatattagaccaatatttgggaagaagtcttgcagatactttctctcattggacattctactgtctgatctgagtttgactactctatgtacctcctatcagtggattccagagtgaatcagaaagtagaatagtagtttgcaggagctgggatcaggggaatagggtgttgttccgtgggtgtgcagttccagttatgcaggatgaggaggttctagagatctcctgtacagcttcatgcctatagttcatacagataaagtgctccttattcagaaagcttaaaacaaagtgttttggatttctaattttttttattttggaatatttgcagtacatgtactggtttagcatcccaaatctgaaaaatttaaaatccacaatgcgccagtgagcacttctttttagcatcacatcagtggtcagaagtgttgacttttgagcatttcagattgtggatttctggatttgggatgctcaatttgttatactgtaattttcccataaaaagttgtcaggagtttagacctcatgttgtgttctgactctagtaacaaaaaaaaaaaaaaatttggaggaaacattaaaatgttttcataagtggaaacttttactgatggtccaaacatctaagatcaattgctggtagtagtatttctcttgagaccaaaataaggtttaggtgtgccgtgaattccagcaggatcacattatgctcaaagaaagatgccaaaggtgattggaaattagcagctccttaagtagagagagtcccgttaaaaggaccgaactggtcagtgcatcaattacataaagggaggaaggatgccaaattaaaagaagtgatgtgtgttatgttagtaaatatagaaagaactccctgcttctaatttctgtgcagaattaggaaaaatggggaggactgcaaaacaggtaggtgaaatgctttcttcattttctcttaagctcaggaaacaccactaaaatttaagtctgtgtgaatcaggaagattctaagtgagatgccaatggctcgtgtgtctccccacatgcagaactccaacttatgaaaatggcatcatcatgaggaaatagttgtatgagacacaggcagtaaaaccattagatatcacccacctggccacctccaactggtccccaaaaaccaccagtattcccattatgtgtatgttacagcctttgtagttgtcccacaactacaaaatttaaaaattgctattgtcaaaacaaaatattaaatatgaagttgaatatgttgttccactttttcttccccactttttttgaactttcctttttcagttttggaagtttctattgacacatcctcaagctagggattctttcctcagctgtgtgcagtctaccagtaagcatcaaaagcattcttcatttctctgacagcattttttttttctgagacagagtctcgctctgtcaccctgactggagtgcagtggcatgatctcagctcactgcaagctccgccttctgggttcacaccattctcctgcctaggcctcccaagtaggtgggactacaggcgcccaccaccacgcccggctaattttttgtatttttaatagagacagggtttcaccctgttagccaggattgtctccatctcctgaccttgtgcccgcctcggcctcccaaagtgctgggattataggcttgagccactgagcccagccatctctgagggattttaatgagttgttgacttttgagattgttcagctttttacttagtgttagaactgagtgacaaattccaagcttgttatatgcctgacaggaagccagaagtctctaggaagtgaccagagaatgtgagctccatagcaggttgaggatggagtcacaaatgaaatgggtgaaatgagtccatgtgctttggggactgcaggcctctccagcctctgacaccctggttagtcagggcagagattacacagtgacaggaaactagcatggctgactccatctggcatctagtctcaggctggctgtcctcactcattcctggacataggtcaggctaaccttgggaggaatttattttatggtttaactttgaagcaagaatgataatagttcctccataaaactaacacccttactttgcccagggactgcttttgtcaaactagtgaaagaccatgagattaagattataggagggaactgaattctgctaaaatgttgtcacagtttctataatccctgactgctccgatgtcatttggcaagagtttacaaaatttgtaactaattgctcctatagataacatcactattgtagaacgtgagattggtcttttgagatgtttctcattcttttgcattctggcaaccggctgacctcatccatacctatgactaatggctcagtcagtcatgtggcccctacctggaggcagattcaagcacaaacaaatcatttccctccggccgcatgattccatcaccaaacaatcagcagtactcattttttagtcctgtgcccctgaaacgatccttgaaaatctctaacccctgatccactggggaggctgatttgagtaataataaacatccgtcctcctgtttggcagacttggagtcattaaaatctttctccgactacagaccaccatttcaataattttttttgtgtgtgtgtgcaggaggccagaagaacttgtctggcaattatgagtggatggaggaactgcctatccctgtcccatgttcttgtccacaggtcagactgacaaagggaaagagccatggatgggaatacagtggaatatttctcttagtgacctggggacattggctggagatgaagccaggcaggagtggcaactccaggtgatttctgtgcctttcctatttcctgggaggtgggccaggccacagtgttagtaggaagggaaccgaacagccagcctagttagagggaatgtctggggaaggcctaggggtgggggaagaagctgtgcaggacagggcttgccagtcagaatgaagtgggaggaagatgagggacacagagaagcagagagaggcagagacaccatggcagtgagcagtgagggagacactgacttcagagaccccagggcccaggtgcccccagttccacagtccaggaccaaggagccctgagaaccctccggtggccaaagagcttcagagttacatgaggtggggtggctttaggggcaagaggtagtggggggatgaaacgtgggtgtcagcctctgaaggacaagggacaggtgtggctagaacctcctaggattctgcatgcaaattcagtctctaaagaggttttggatcattcatttcttcattcaagttcttcattcattatgtgagagctcctgagtgtgtgtctctcgctgggcctgtgctggtgtagggtgtgagtggggaaagaaaacaaggtcctctccttgatcctctcatgacagtgacatggacactttgggaaacacaggatttcacgttcagtgatgggggttaagatctgagggggaggcctggacatattttttgcactgactctgatggttgaggcaggtgatttagttctggaatacagactaatcagctgaccatttgctctcactcctctgaggtttggatgcctaagaagagaggatttgagccaataaatgactatggggtccttggaacccagtaagccctcacttctggtggaggagaggataggcctgtggctgcagacagacctcatgtgaccctgatctcccctttgtgtttgtgtgactctggttcagtgactgcaccttcctgtgcctcagttttctctcaatcaaataaactaaatggcaaatggactgtggcttttcatgctatctgtgaataaatgttaaatgattcacagtcacctgacctaatgcttggcacagtggaggtttcacacaagcagcatttattattaatttgcttccatgagaaagcaccttatgtcagatccctgtggacaagctgctaccaggtacatcttctcccttctgtttctgcttctggggacattagactttctatggactgtcctaagcctcccaaggcagttggctgatgtcctacaaagcttgtctttctgtcctctccactctgagtgtcagctgaaaaagctctgtccttgcccagatgagactctgagggctgagccctggctggtgaacagctccaggagacacagtcctcagacagctggtaaattcttggtcccagtaaggcctgcccaagaagccacaacccagcactggcacaggctcctcagcttaactggagcaaggatttagggacaggggtctggggttgaggcttctagggctgagcttctctgagagtatctcaggggtcccctcaagccaagccctactcagttctccagggtctttctcagggtcaaatttatgaagagggcatgatgtgcttggctgagactgatctcctcctgctgagtccccccatcagactgtccttcctctgcagcgagtgtctgcagggtctggatgcgggaaaggaattctgatctgttgaaatttgtctcctctgtgtgtgtcctgcactaaatgcccaaaccccagcatgggacataatgcagagagtgacacaggcagagtccaggcctgacaatcctgtgtgtgtgaagtagaaatgaccccttccccccaacacccagggatcatgtggaatcactcacagtataaggtgaaggtgaaatgtcgaatttcttctctagtctcatcacctcgctttatgatgtgtaaggtgtaggttcctgcatccttccgggtgacattctggatcagcagggatgcgttggaatatactgtttctcttccactgtatgcaggcccatatataattattttaccatcaactatatacgatataatgtaatggtagaggtccgtcatttcccctttgtaccagaagtagccaggaagattctggggcaaattgtggacaagtagaagaacatccttcccctcagaaactttgggtggctgggcttcaatcgtgacttcggcagtggtgggcgggttccagaagtttaaaagtgatgctaggagggggagacagcatcagttaatattgagacctatgtattgtggtgaaaagatggggccctgggtcctgagaaggtctcttccatcctcagccttgaagatacacacacgcacacatacaaacaaacacacacaaaaaacgggcatgtgtgtttgtgtatgtgtatgtgtgtgtgtcctactgtcctactaggtcaaggtcagcagcatgacccccattccttcaacacttctgaccttggcatttttctgtttggaatcctcttccccaggggtccacacggccccctccacactgccctcaggtcctgctcacatcagggcatccttagacttctttcctgacacctccttcagagaccctgggtcttccctttctgacctttccctgctctgctccctccagggttcttgtcaacacctgatctcacattctacatctcttcgcatgtctgtcttcctccccatgacagcgtgagctccgtgaggacagggacttttgtgatcctggttgcaccccagtgcctgggacaggctgcagactcctgtagatgtgagagttctcagggccctccatgccctgggtgtttttttttcccccaattgttgaggttttttgctgaggatagtgtttcatgtcctgcttatatttttatttgaagtgtcatctgatatagttattattatcatttttcaaaatgtggtggccccggatgattaatcaggaaaacagaacacttaagattttcctacctcttaccaattccggttcaatgtgactttcctcttttgacccctgtccctctctggtgtattttcccctatccaggctgcaacagagccttctttcctttttttcttttttttttgagacggagtctcgtactgtcgcccaggctggcgtgcagtggcggtatctcggctagctgcaacttctgcctcccgggttcacatgattctcccacctcagcctcccgagtagctaggattacaggagtacaccaccatacctggttaattttttatatttttaggagagactgggcttcactgcattggccggactgatcttgaactcctgatctcgtgatccacccacctcagcctccctaagagctggcttcttttattttacaaccccatcctctccaggagaccccatccagtcactccgcttcctccccctgtcctctcccaggaagttctctcctcacctgtgagcaggagccccttccaggtgatgcgctgtgtgcaggaaggggctgggaggggccccatggtctctgctgcctgtgtgttctcctctgtggagatgagcctgggatccagaagctgtctgagcacggctgtcagctgtgctgtccttcctccttctgtgctgagcctcttcccggggcaggagcacttctcaagctcatgggcggggtcagtcccaggacacctctctgtccccttctctctcagtcctgcctccttgtccctccttctgtttttccttttgtctgtgtttcaggtccctgggagttgtggaggcctctgcctttttcagcagtgattctttcaccaaacctcaacacacactttgtgcagacacacacacacacacacacacacacacacacacacagaagagacacacacagacccacacagtcaggcacataccctgcaggttgggcaagcacagtcctgggcctcagcctcctgctgtccccatggctctgggttggggtgcacattcatgccttttaccctctttcatccccatctggctctccccttcagtgcaggaggctggagatgcaccaggtccctgtcacagtgacaccccattgtgctgtgggtgagctgtgtgttgcctggtgagagggacccttcctttctctaatcgtgtcaagcttgactgcagcttccaaggatggactttcaggacctgggtgtcccagaggaaactgtccttcctggaggtgtgcagggtgaatctctcatgcctcttaggaggagaggcctgtgctggttgctcagtgggggctgtgagtcccatagtcaaagggacagttctctgtcagtctatggctccctggggtctggcggctgagctggagctcagggtttctcatgttctccctgaccatctttgatgtcctctcttctctgcccagctgattgtcctgtggtcaccacaccttccccgtggtggtgcaggaggaagtggggagttacccaggaaccccgcgggacatggctcattgagacgcaggagggggagcctgggacagagcaggggttcagagctggagagattcatcccgacttactccgtggccatgatgggctcagccctccatgtgctgacacacccaggggtctgtcctgagggttttgacctggccaagctgctgtctgtagaggaggaacaggcagtgaccagagaggctctctggagggacgttgctcacacctgagagggcgggtgggggtgagttgtgttctgggagcaaagagcaataacaccgcccttctccacgcaagtacacaggagaggtctgtcttcccaagggacagctgggggtaggtggccacatcccggatggtacctgtgaatgaccatcacacgctctctgagccccctggggtgcagggggcaggcaggtgacagggtgcctggctgattcccggggaggctgtgggccctcaggcagccgctgttctgtgtcggcgctaggcttggcctgggaagccccagagaacaggacagatggagcaggggcaggcatttagggagcagtgacagaaagagttgatgaggatggagagagttcacgaggggaaagcgcccagtgtggcgtcgcgtgcaccagcgctgccctgggagatgcctttagctgggcccagggaaggagcaggtgtgtggggcaggagctccctgcagagggagtggtgttaggttggcggccgccaggtcagggaggaactgacagagtccgtgtggggagcatggagggtgctgaggacttgggccgaagtgaccctggtgagggtggaccctgctgggctgtgggttccgctgagggaggttggcatcccctgggaaggctccaggctgggagggactctgtcgccctctggtggacagggagggaagtgtgaacggcagcaatcccaggccaggctgcatgttttattccacttcacacgaggtcacacatatgttatgttacagctccttcaccttccagccccgtgagtcccagtctctgtggctctacgttcactgttatccctctttcacaatcagatgtcccaaacgcagatttttgtcaccttctgtgagtttgtgtttgtgtgcagtaggcaacactgtgaataccctgggggcagtgatgcctggggctgagcactgcacatgggtttgagagcagaagagggagcagcagggtgggaagatcaacgtcaggggggcaaggacaagtcattttcattttctcactcccagggaccagaacccaggattctgactccagggcacagtaccacaccctgctggtgtccctggatgtcatgatgctcatagtgtcatgttgccttggcattcattttttaaggtgtaagtttatttgcctcaaatcagaggcagggcttggtcaccatggtagttttcaatactgtgtctggttcaagtggctccagttggtgtccagagataaaatcttagaggcatctctcctgcttggtgtgctgggctcccctctctcaagctgctttctttaaactgataattctgacattcgccctcacatttaaagtgactacctctcagtcacagcgtgagctcctggtcccagtgtttgctgcttgctttgaacacatccattaaagctccctgctggaaacctgtcagataacaccctggacttaataaagccattcgcttacaggtctcttctctcctccctgcatggggtcactgaccactgtgtctgtggtctccaggtgtgccgagtgctccctagtgtctggaagtagtaaaaatacttacattttcacgttgtggttgtattgctgttgcctcacatgccatccagggcctgacattgaggctgccctatgggacctgtgctggttgagcccttgctggagctcttgttttggggcctttgattctcctggggacaggagcttccagctaatttgattgaaatactgatgtgtttcattgacacactgggtcagatgatgtattcatgggcttcagctgccataacaaacaccttagcttgggtgaacgatataatagaaatctatttttcacagttctgtgaataatgtgctatttcaaccactttaaaatgcacaatcaagtgaaattaaccacatacacagtgttaaattaccatcaccactattttccctagaaaatttttatcattttaaactgaaactttgtatcttttaaacaatacctccttgtatgttccaccctagactttgatcatctctactctgtctctatgaatttgcctattcttgatgtctaatataaatggaattatacacttacgttaatttgtttctgacatatttcacttagcataatatttccaaagtccatgcatgttccagtgggtatcagagcttcattcctctttatggcagattaacattctgttgtatgtgtcaccatatttatttattgatgtgttgaggagcacttggattgttttcatattttatattttgtgaataatgctgcaatcaacattcccatgcaagtacctgtttgagtccctggatttaattctttgggtatatacctaggaatggaagttgtttcaaatgagaattctatgattagctttttgaggaaaagcaaaactgtttctcctttttatattctcaccagcaatgtatgaagattccaaattctacataatactggtacttgttatttaacattttaaaagaatggtagccagttttgtaggtgagttgtcgtgtctcattgatgctttgactttgtattttcctaacgactaatgatgttgcgtatcttctcatgtccttcttgactatttgtatatcttccttgaagaaatgtctatttgagtcttttgcccatttataaattggatggtttgtccttttgttattgagttgtagctagttctttatattatctggacatgaaaactgcctatatgtggtttgcaaatattttctctcattctgtatctattaattattttcttgataatttcctttgatgtacaaaaggctcacatcttgataaagcccaatgtatatttttttcttatttctcatgcttttgtatcatatctaagaatccattgcacatttgaggtcatcaatatttacatctatgtctattttaagatgtttttatggttatagatcttatatttaactcactgatcaattttttagagaattgtttgatatggtgggaggtagagttatctaaattcactgttttgcatgtggttatctagttgtttctgcactatcattagaaaggagaattgttcctccattaaattgtcttgacaccctcttcaaagagtaattgaccataagtgtgagggtttatttctagactctcaattctatcccatttgtctttatgtccattcttttgccagcagcttctgttttaataattgtactcctttgtgagatttcaaataagaaagttcaagtcctacaatttcttttggcaagattgttttggctattctggggtccttttttgaaaggtggggaagccaatgtttcacaattgggaaagccttttctgtcttcttcagggggaaatttgggagaatcttttaagaaacttaatctaagtaggtaaactgtcaccactttatttgctgaagtgctatgttaaagtgtgcattgcctcttgtggaagaattgtgagaccctggaagcacttgcccatgtggtgagagacagtgaattccacgatgaggggcagagaggacattgttttgtgatacaatgttgttgggggagttgtatacatctcaacttctttatgtctctgtacagtgggtgtagggaccagccccacagagtcggtgggcttttctccccatgtgcagagatgagagattgtagaaacaaagacacaagacaaagagataaaagaaaagacaactgggttggggggacctctaccaccaagatgtggagaccagttgtggccccgaatgccaggctgtgctgatatttattggatactagacaaaggggcaggataaggagtgtgagccatctccaattgataggtaaggccacatgtgtcacatgtccactgtacagagggccctttcctgcctggaagctgaggcagagagagagaggagaaagagagagagagcttacaccattatttctgcttattacagacttttagtacattcgctaatttcctactgctaactaaacggcagagccacgtgtacaggatggaacatgaaggcggactaggagtgtgaccactgaagcacagcatcacagggagacagttaggcatctgaataactgcgggtcgacctgactaatgtcaagccctccacaagaggtggaggagcagagtcttctctaaactcccccggggaaagggagactccctttcccagtctgctaagtagtgggtgtttttccttgacactgaggctaccactacatcatggttcgcctggaaaccggcatcttcccagaccctggcgttaccactagaccaaggagacctctagtggccctatctgggcataacagaaggctcgcactcttgtcttctggtcacttctcactatgtctcctcagctcctatctctgtatggcctggcttttcctaggttatgattatagaccaaagattattataatattggaataaagagtaattgctaccaattaatgattaatgatattcatatataatcatatctaagatctatatctggtataactattcttcttttatattttattgtactggaaaggctcgtgcactcagtctcttgcctcggcaactgggtgtcctgccgcccacaagtgggcatctccattgcacacagtaggttttgaaatccttgtttatcctctggggtctgggtcttggcttacctgttagctgcagctgaaagaggtgtctgctaagtcaatgacacctgtggggagaagaagggttcagcagagtgaaagtagctggggctcagagaagccaggaaagtctgactcttagaaactgtgggtcagcagatgggtgtcctcagggataaatgggccatgccggtagccactgcagtggattggaagaaggtaagggatgctgggtgtcccatgttctctgtcagctctgcagctgaagatttgggccctgggatggtacggccctgcagcaggggatgggtatacaggaatggctgcatatcgggaccaagtccatgtcatcttcttaggcattgttactgcagatggaggattctgttcagagacctggcctggacacatgggagggctcaccccattcttttaaaattattttaagagaacagtattagcaaatgtggtacatgttttattctgctagaatcagtattactgtcacgttttacaatgtatctcttaggaaatggtgagagccatccacacaatgtgcatttaaaggagactctactataatttcagctttcctactctttatagaaaccatcttctctgcaaacacacaggcaatatctctgtgttcatttctattgggagccctgtatgcaaggtggagagagccacatttccccctgagatgttacataaaagtttgaggttgagatgacatatctgacactctgttattaccctcagaagctactacatgtgaaattctaatgactgcattatcctgccaagtgaaaaaggtaggcatcagcaaggacagttaagaggggtgagagcctcatcatgatggggagtcttgttctgacatcttgggaaaaactgtccacagtgtgaagtcatcaacttgtcctggtttacagtttgagtggctgttgttatggcgtcgaacattttggtgagttctgagtggctcacacgtcaggtacaagggttttcccatgaaatttacattgagttgtccaactccagcttatagggcttctggaacagagtgggtcttgctcttagtgattccatgggagaaaatggaattggaggaactagtagaattcagggtaatgtccagtctacaggtggataataaaaacacagaaacaatgaacagagctgcaatctcataaccggtgtactacagtttttattttccacataatttttctctctatgggcatctctagttttaccaatgataatttcagtagaataagtttgtttgcaaaataggttgagttacttcaaacatggtctgattctttacataagtgcagcaagagtagcaatggaccatgtaggctctcttttaaaattttctttgctctaagtttttataaggaatctcagattaaacttttacaaacctcttgagaacaggaagccaaaccaaggttgacttcagactttgcctgcagttcatattggttcattctatctatattcttgaatataacatcccagtcaaagccttggtaataaaaccaatgatttgaaatgtgtcgtgttaaaaagagagcagactgttactgtacttgtgcaaatatctgtattaccataaacatatcaattctcatgaatagttgcccaattctggggcagtcaggtagagagcaaaagtaaatgtttcaataattgttcccagaagtatagtttattgaactgctataagctatagatagattaaaagaaaaaaattccataaatctagaaaacaaaccatttaaagaatcagcaaattttcaaataaaaatcataaaaacattatcctcattattatcaattatttcaatgaaatcaatatttttcctgcttggtacactgagaattttatgaagatatcagcctgtttcttaaagttttggaagttcttagacagtccggtggtataatgtgaaatttatcagaaacttgtattaaagagttcttgtcagcatcgtttccataaatctccttgaaaaggaagcatttttggactgtagctgattggaaatgctttgaggaagactaaaaacaacgtctgtgaatgacaaagattttaaatgactatggctaaaactctgatgagaattcattatgataacacagctcacataaaaggttcattacttctgtggtatatgacattatggctgataacatatttaatttctaggaatctcatacaatttctggaacaatcatatcagtaacatatccataaatataacatagcaaaggtttagcatcctttaccacttatgatttgaaaatgcttttcatataattttacatatcaaataaagtggcttttccatgtagcttgtgtttctcaacaggattactgagttcttggtggaggccattaatgaatagggccaagaaagtataggcatatgtatgttgaaaaatatccctagataattctaatactcccagctaataagcattaattgaggtctaagttttacctattagaacagctgttctctattctggttacacattagtagcacctgggaagacttaaaaattaccaatgcctgtgtctcactttagaccattaaattggatcctatgggtggggcttgggcatccatttaaaaaaacgttttccagtggttccaatgtgtagctgtatttcccatcagatttctctgatttcttgtggcattcacgtttttctattttggtattataattattttttgggtcttatcatctatcttaggctttatgttccttggggtagaaaccttaccttcttcatttctgtatctttcatgaacatatgggttggtcatcaggaaaatgttctcaatcacgtgtaggttgtgttctgagtctcaggtttacatattaatgctagagtcattgttctccaggaggtcagaggttgcttgtgatgaagggtatgggtaatcccatactgcagatggtagatgggagatcaccctgtttttagccatagcattggaactaagcattctatgtgtatatcaggtggaggggaagggatgtgtagaaagacagatttaattagaatggaggaattatactagggaatagagggaatggaagcaataaaaattagtaaagagaagaaatgtgaacttatcaaataggcaagagtagatccctgaagatttttgaataggtgagttaactagaatttaggaaggtaataaggcagtcatacacaaggaagatttcaaagactggagataagtcaagcagtatctctagcagttgttaaggttgtgggaatggagagaatgacaaaagtgaggatgttaaaaaaaggatcaagagggttttataaggtattgaatctgggaaacaaatgagcagaggctgaggatcatcatttgtaggagacagtggggtacagggagcatgaagaacaggggagaagagaccagcaggaataagtgctgagaagcaggagtttagtgggaggaggaggagatccagtcccagatacaggcaaagaagtcctttctctctcccaagcatggcagtcagccctgcaggaaacaggacaaaaggaaaggccatcatacctgcagtcttcctgaaataaactacaccagggctgctagatcagagccacactggccagtacttcaatcaagatgctgaccgtggctctacctgaaaggccaggagaacttccttgtactgaagtatctgtcatggaaagaaaagaagagaaggaataaaggtgatgttattttacagtgtggtaccttagtaaccatcactaagtatgaagtagtttctacttgttcctttggggattacattaattttgtgggagggttgctggtagatgattagccaactatattcttacagttttttttctctatcaatgtgtttctaggttagtgatcagtcttctgtcaatttcatcctgatcatgctgcactcagatatttttgaagcctttatgatgtgagaaaggctgactgctattttctgtgtcattagaactttctaccctttcatggttgcatctttttctcagtgtgtcagttgtggtaggtatgaataagactctgtcaggtctccatggcagcttgtgtttctcaagaggattactgagttcttggtggagcccattaatgaatagggccgagaaagtataggcttatgtatgttgaaaaaattccctaggtaattccagcactcccagctaataattgatttattaataatcgattgacttgattgacagaaggcccagatcagtgcattccaaattgacaacctactttgcatagagtcctcactttcctgaagctcccagcagggatatgaaagcaagcccagttctatgagcctctgtttcattctcctgggtgactggtggggagactccccatcagtcttgccatgatctctttgaactgtagctaaatcttctttctctttctccttcacaggaatcagatttgatagtggtcccaaagcttcccagacttttttcatgcctgccccactttccctcacaggcatttttcctaataaattatcctgcatgtctaatctcatcttggatgcatctcagtgggcataaactaacataccaggcttgatttttttgcacttagcttttttctgtctctcccacatgtagccagtaaccatgtcctagtgtttatgtgttacctcttttttcatgtgtataggaaaaatatatatatttccatatacctatttatacatattatataataaaatatgtaatataaaatgtatagtaatgaaaaacatatacatattttccatatacgtatatggaaaatgaggtaacataaaacatcaggacacttacatataataaaattgacatatgttatatatgtatgtagtgtctgctagtcttaccctctctataaatacacactttttgtcactgccccttccttcccatgcagagctcccatggccaaatctccctatttccccaagtgtgtgtcactcgctgtcctctgttctgtgtcccatgcgctgtgcccacagcctcctagtgttttatgtgttctctttttctatatatatatggaaaaagcatatacatacttctctctttatatttatatacaatatataataatctaaaaatatagagtatataacaatttaaaatatatacatatttccatatctatgaaaaaaggtaacacataaacactaggccatttatacataaaattcacatatgtaatataaatgccaattttatcatatacaaataagtatatccatatagacttatcatatataaggtgaatttggaatgccctgacctgggccctctgtcagtcaagtccttgccatggaggccattcatggctgccacaactgagacaccaagagaaagatgcaactatgaaaaggtgaaaagttctaaagtcatagaaaatagcaatcagcctttctcatatcccaaaaccttcaaaaatatctgagtgcagcatgtccaagatggaattaaaaacttcgatcttgaaaaggaaaaaggaagctggaggactcacactttcagatttcagcatctactgcaaagctacagtaatcaatacagtgtggtactggcataaaaaaggacatagaaaccaatgccatagaatagagaacccagaaaaaaagcttgcatatatggccaaatgatttttgtcaagagtgccaagaccattccatggggaaaggacagtctttttaacaagtgatactgggaaagctggctatccatggacaagtatgagttgaacatttacctcacaccatatccaaaaaaatgaacccacaatggatcaaagacctaaatggaagagtgaagactaccagactcttagaagaaaacataaggaaaaagcttcatgatattgaatttcagaatgatttattagttacaactacaaaagcataggcaacaaaaaagggataaattggacttcatgaaaattaaaaacttttatatatcaaaggccattatcaagaatgtataaaggcaaactatgacatagggaaagtttctgcaaatcatatatctgataagggattaatttccagaatacatgaagaacactacaaatcaaaaacagcaaaaacagaaaagcccaattaaaaaatggacaaaggactaaaagagagatgttattaaagaagatatacaaatggccaatgagggcatgcaaggattctcaatattactaatatttagagatctgcaaagcaaaaccatggtgatacacgacctcacacacattaggatggctttgataaaaacaacatgaacaacaacatcacaaaacaagtgttttcaagtacgtggaaaaattgaagctctttgtgtattgctgatgggaatgggaaatgttatagccactgtggaaaaaaatggcatgacatggccggctcatgcctgtaatcccagcactttgggaggctgagatgggtggatctcttgaggtcaggggtttgagaccagcccggcaagcatggtgaaaccccatctctactaaaaatacaaaaattagctgggtatggtggcatgtgcctgtaatcccagctactcaggaggctgaggcatgagaattgcttgaacctgggaggtggaggttgcagtgagccaagattgagccattgcactccagtgtgggtgacagagcaagaccctgtctcaacatcaacaacaacagaaaagaaaatggtatgtcagtttctttaaaaaaaattaaagcattaccacttgaaccagcaattctacttccggacatacagccaaaagtattgaaaaatatttgaacagatattcgtacactgatgttcacagcagcatcactcacaatagccaatgggtggaaacaaccgaaaagtctattgaaagataagtgggtgaacaaaaaggtatatccatgctttggaatgttcttcaatcttagcaagggataaaattctgacacatggtgcaaaatggatgaaccgtgaagacattatgcaaagtgaaataagccagacacaaaagcataattattatatacttccatttatgtaagatagttagaatagtcaattacatagagacagaaattagaatggtgattaccaggggttaaggggagaaggaatgagagttatcatttatcgggttcagaggtttagtatagtaggataaaaaaagcactggaaatagatagtgttgatagtaacacaacagtaaattgcacacttagaaacagttaatggtaagtcttacgtatatagtgtctggtactcttaccctctctataaatacacactttttgtcactgttccttccctgccatagggagcttctgtgagttaatctccctatttctccaagtgtgcatcactcactgtcctctgtgctgtgttccaggagctgtgtccacaaactcacacaggcagtgacttcagagccaggacacagtcctattcccattttttaaagccttacccatgggaggcttagcttctactggcagctcgatttagccagattcagaaccggccacccaggcaccttatccacatgcctgccccaccccccggctggagtcagggcagggtcggtcactgagcgagcccacagcaatgcagggagcagagtctgagctgcttctgcttcacccaaggggcttcctcctgtcatttggggaaaagtgtgggcttgttttgaagcctctgatgttcatcgcagctcatggagtacacacacacagacacacacacaaaggagacagaagggatgttttggtgacagaaacagcttgaccatgaggaccctcctctttctccgtctgtgaaggcccttatactgcatagtgcttggggctgataaagccatttccctacatttctcaggctggacccaaggtcatccaccagaaatctggaaaacaaagggaagagaatctgtagatatgaattgggagtgttcaggagaaaaatttgggatttacttttgtgcatgggacacaggctgagaataaaaatgttttcctggctctttcttggaaagccagataggcttcacctgaaagcatattgccaatgctccagcgatccacttaccagggactgtgattttcttggttgcgaagtttttgccattagtgactgggttatggacataacacagatagtccccactattctctgtagtgacttgggggataaagagctcttgtcctgtttgctggttattcccattcagcagccaagaatactctgctgatgggttagagcccatgaggcaggagaggttgaggtttgaccctgcatagtaataggtgtctgaagaataagttgtgggttcatctgggccatctggagcaaagagaataaagccacaggtaatgttatcagagggaatgggaagctcctggtctgtgaaagggacacaatgttcctttttgccaagtcacaaccctgaagtcccagccaaatttcttctgtgttcactgaactggaggagtctaagacattcacgtgttctcccatcgcaagctatggaaccagagtcccctaagaccggagaagcccctcccttcctgggcctacccaggtttgcctgggacagaaagtcatggccagcttgggggtccaggggtaagtgtcttcatacttggacctgagagggactgagaggcctggcctcgtgttatgtggatttgggctggcagccttgtccatgaaggaaaagaggatactcacagagaacatccaggtgactgggtcactgtggctggtactcactacattcttcctttgacattcatagagtcctgtgtcactccttgtgacactgagtagagcaaggaccctgttatcattggacatctttagcctgggactgagtgtgagtctatgactatttacccaccacatgtagattgtgccatgagtctcaggttcacaggttaagaccacagcctcctcatcctccgcggggttgctggtgacatagggcttgggcagattcactgtgcagataacagagaagattcccctgtgtggcaccattgatttctccacgagcattttccaatcagagttgacatctcccacctctcagccaatccaagtccttaaaagcccacagcagttctgtgtgtcaaaagacagatggatgcatgatgatctgagggctcagagaccatggggccacctgctctgtgtgggagatgcacagacttctgaactgtgaatcaagcagcaatactggtgaactgtgaattgagcagggtcatataattagagtttgattaactttgtttaaattgggcagagtctaagtgaggcagcagtggctcatgcatctccccacccgaaggaccccaccttatgacactgttgttattatgagtacacaggtgtgcatgaaacaggcagtaaatcaaacagcacccacctggccagctccacctggtcctaggaaccaccagtattcccattatgtgtatgttacagcctttgtaggctacaaaatataaaatacaacttcagaatataaaatatgctattgtcaataccaaatattgaatatgaagctgaatatgttgttccactttttctcactcttgttaaactttgctgtttcagttttggaagttcctattgacacacacttaagctagagattctttcctcagctgtgggcagcctaccagtaagcccatgcagggcattctttatttcgcttaaagtgtttttaatctctagcatttcttttgcttctttcttagaatagccatctctctgtttaaatcacccatctattcctgaaaggtgtctcctttttccatcataatccttaaccagagttgttttaaattttcagtctgataatttcaacatccctaccacatctgtgtctggttctgatccttgctctgtttttcaaactgcattatttttttttttttttttgccatagtctgtcttgtatttttttgaaaaccacacatgatgtactgggtaaaagggacttgagtgagcaggcattcagtgacatggtggtgagtgaggggagggaagggttctgtggttctggatgagatctgtgtcctgggctgtgaatgtcacaagtgcctctcaggtttttctttccattaggtgggatatgatgacttgaggaggctggagttggatatttcccctccccctggccagttaagctcccatcaaaccccagctaattaggctgcagtaaaatagttcctcttaaatgtaggtcttaccaagaagaatataattcactgacaactttccaagtgtttttttcccttctctcctacaagaaggatgcagggattctttttggatattgactgtgagaacctggtagagctccaggagctaagagtcataaaactgtccccctactcccaaggctaattcatccactggtgtgtttatctctgcgctgtgtccacactgagcctccagaatttcctcaattagagttgaggttttctgaccccagcactggttcccgctgaggtttctgtgcctgtgtttctgctcaggtacggtgcgctgctctgtatttgcctgtgggtctcttcaatatgtgggccagttagcactgagaccttgcttctctgacaaatctaaatgagttgttgttttttcagtttgttcagctttttacttgttgttagaactgagtgaaaatttttaagctacttacatgcctggcggaaattcgaagtctctagggcatgactggaggatatgagccccacagcaggttgaggatggagtcatgagtgaaatgggtgaaatgagcccatgggctttggaaactgcaggtctgtccttcagcgtctgaccacctggtgagtctatgtagaaagtgaaaccacctttgcaaagcatatgatggtgagaggaagctagcttggctgaccccatctcacctctagcctcaggctgggtgtcctctctgattcttgggcataggccagggtaagcatggaaggaatttatagtttaactttgacgcaaggatgataatagtccctccctaaaattagctccctccttgtcggggactaccgtggtaaatctaagaaaagaccatgaattatgcaggagcccaaattctgctaaaatgcaggcatagtttctataatcccttactgctcaggagtcatgtgtccagaggtcacaagatttgtgactttcctagttgctcctatagatagcaacactattgtagaatctgagatttgtctttggagatgtttctcagatttttgcattccggcaaccagctgacctcatctagactcatgaccaatggctcaaccagtcatgtggccccccactcagaggcagattcaacaaatacagaccatttcccctaccggcatcatttcatctttagccagtcaacagtacttattccttagaactttgcccctcaaagtttttgaaaaactctaacctctgagccactggggaagctgatttgagtcataataaacttctatcctcctgtttggcagccttgggctaagcaaaaccattttttactacacatcaccttcacaataaattggctttgcctgcgcagagggcaagaacctgtcaggtgattataagaatggatggaggagtcactgatctctttctggtggcctgtttcatgagtcagcctctcagagggaaagagccctggactgcgacacagtggaagctcattctcttggtgacccagggacattgccttattatggatcctggcaggggtggctgctttggctgattttggtgcattttacatttcccagaaggcaggacaggcctaagtgtgagcagaaaggaaacggggcagtcagctttgttagagagggtgtctggggaagtcctcagggtggaggaagctgtgcaggacagggctcatcaggtagaatgaaagagggatgcacttttttcactgaacacctttcagacatctcaccaactctggcctcactgggctgtgcctttcctcctgagccctgagccctgattcctggcagggagggagaaagagaggaagggtgaagctgggatgtgtgctgtccaggtttcttccatctctagaatcttgacagcgagggaccctaatgtgttaccacagaggagaccatgggaaaaagctgtttctcaggggtgcctggcttatgaagtgagggaaattcagaccgagttggactcctgaactacagggaacctgttccatgtcagcaaccagctcctctagctcagtgtttctctctgtggctaattcttttgtatggtttctgagcctatgctagagtcctcctcacgatgcatgatggtcagacctgtgtggggagacctaatgatggggtgggggtggtcttgagtgtcacacagagtgtccagggaacaggctttgtgactttctctaccccagccccacaacaagatctggatagtgggctgggtcagataaagtcagaatccatggggaagggtatgtgtcctggcagtgccgaggttcgtgcctccaggttagctctgagtctctgcaaatacatttatgttgtgcatgtgctgtttgctggacggtacttcttgaacctgtctgcagataatgtcatgagaggtctgcatggaagtgtatgagggctatgtgattagggtgggtgtgttttacacagcgggtttttttttcaccaaacacttttcaaaaaattgtggttgagtgtgtatatagaaacacatacatacttgtatttgttagatgtgaatatatattcatataaatttgacatgtagatacatatgtctataaatatacacacatatatatgtgtgtatgtatatgtgtatatgtatatatatgtatgtgtgtgtgtgtatatatatatatgtgtgtatatatataatgtgccattttaaccacttaacttaaggagagagatagagggagagagaagagagtttctactaataccaaatctgggttaaataagggtggtcttatttcctggggttgggcttttgctacatgtgtcctgttggaagtgagctagagaggttacatgcttaaccaatttagagattttctatatgaaaatcatctgtgagcacattgataagttttatcctcttctacgtgaaaagcttgatgaaggattttaaggatttctcgttggctgaaggctggcaaacggagtttgccatcctctgactacagccattctgaggactggaaaggataccctgagaagtggcctattttatttctgcaggaaggtactgaggtttaatttatcttatggagtcttcctagattagaaggctttgaggtgtgttgatgccttgccagtgacttagctgcctgatcagtgaacctatttcttttggctacttcatctgttccctttttgatgttctctataatgtatcactgctatttctcatgaaagaaaactgacgataataacctgttaattttttggtgatattttataggaagtccattagtggtaagaaaatgccttttattttaaatggcagcatgagcatgaagaactcaaaaagcatacttggaatcagtgtaaatgttagctacctttcccttgcttaatttaagtgctcttgtattaactgtttgtttagctgattgagcacctgcacctgaagagagatattatttagagtgactactgcttatcctaccttacgtatttcttgctttaccagctgattgttagctaagagctccctctagaggaaagtaattttgccacattaagtgggggtgtaaaccgttttttcctagggttaatttggaggcttttctgattagtagagctattgtgacagtggtttggaagcagatgtaaaaaataggtcctcctaactgcaaataagaggctgagaaaaatattggattagaatttttcctgagacaccccttatggttgtgctatgggaagaggggaggcctggataagaaaggagaaaagagagagactagatctagtgtttagaaggaggtctactttcctccctataatttccagaatgacctgtgtctcctgtgctgtaatggcagtttgagctgctggagccaggggtttgagccccaggacccatcagtcctgctggaccactgtgagactggttctgaacccagtgacctccatctctgggagcagttgcatctccagtggtctccaccacaggctggacagggtcaaggtggcttcctcttgctctttggacacttcttcctcaaatgccctggcttgccacaccgagagcaactagtggatacacctctgggatcctggactttgcaactctgcaaagcagctactagaggctttgtccttctcttgagctttctctctttcttctgggccttctcctagtccctattataaaagactgaagtggctaccctcagaaggttttccaaggtgctatctgctactatagcttgccttttataggttccttctaatattgggagctttatgtataataaacttatcttttggaatgggctgtcacttgactgaatcaggagataaaaaggtgtgtgctaatagtgcccctctcaacctatccataaaggctgcaggattctcatctggctttgagtctatcctagacagtttagaggaattaagaggtctggccttagtttttctttttcattcatctacagggctattggggtttcaatcagggttgtcaagaggtactgcttcacttactatttggaatggtgtttctgctatttcttcactttctgtatctccttccttcccttttggtgtattataggagatatgttgctcatctccaaaattctctgctgcttgcagagctgcctgtttttcagctgcagttagggtttggattaggagcagtataacatccttccatgtgaggtgaaacacctgacttaaattctggaaagcttctatatacctgtcaggattgtctgaaaattggcctaagtcttactttatttgcctaaggtcctgtaatgagaagggaacttggagggaccccaaattatggagattctcagatggttcccttggaagttgcttttctaattctaggatattattctttataagcctgcctgatatggctgttaaaaaatctgggttgctgttacaatgcttgtaaaggtttagtaaaaatgccctgtcattttgcaaaatagaatgagttgcttttctcttgaaagtcctgaggttaaaagagttctagtgcctcagagtgcgctccagaggggtgcaagctgaagatgctctgttagccattgagaaaaagaagtgagaataaaagtgtccttatagtcctccttatttcattgagacccagagtggagtggaagacagtgggagcgtccccccaactgttttctctccttggttcctgagtcccggcactatgttaaatgtgctgcccatggttgtaggtgtggccctgtaagccatggaactagataaatgaagtgatgggattagccacactttacccatgcaacattagcttatctgcctgtgatctgcctggcttcctgaaaaatggatctctcgagaaactgtaacagttgcctttgagcaagctttctttaacagagggaatgtgccagttgccagatacgtgctaaagcatttaccctcagaaaagtggtcctggttaactctgttcttaaagtatccttactaattaaatactgttctaattggagatagaataggtactttaaatgaatgtagggacctaatggcagtttttcctgctgatgcagcagtatcagaactaaaatttggctatggaagacattttactcctaattgttgaaagcagagctttcccattcacagaaagggcttttctatcagtgcaaaaagagagaattggaaaagtgcagtgttatggcaaaggaccaacaatgtgccttatgaggaggatttctatttctactagatgacattgttggcttagaaataccacgtgcttaccaaaggaaggagagagagagagagagagagactgagacacctattgggttagttattatagcatttaccgatctttcctaacagaactgtttccctgaactgtaaaaatttccacatattgcatacacagaaagaataggagacatagagaccatggatagaaaggaagaacaaatttgcaacaggatagcaaattaggagacccattaccaacatctggatgggctgccggaggctgtgttcagtccagaagcctttgaataacatcagggtgtgtcctggccagaaattctcagctgttccaggacatcccccagcctcatgtgatggtgaggttctccatgaaaggaaactagttggaagagaaccttgaaattaaaggacagatttgaggtttgctccatactcaccattctgatgtttctatcttctcttctgatcacaatcccagatgagaactcccaaataaaatgactctgtttgggaatctatccatggttctttgtcacacactgagaaagaattcaggacatggaaacacatgaggagtgtgtttaggattgaaaaatttaacagacaaaaaagaagagagagagaaaaagctttctcatactgagaaagcagtcacccaagagagggtctccaatttggggtggaatgcaattgattttgtacagagacttaaggaggcagtgattgatttacatagggtccaggggattgttttgaccaggtgttccatttacatagcctgaaaaaagactggccctcccatcctattcttttattatgcaaatgtggcttctacctggtggtcaccatgaaattaggagatatacctaatgttaaatgatgagttaatggttgcagcacaccaacatggcacatgtatacatatgtaactaacttgcacgttgtgcacatgtaccctaaaacttaaagtataataaaaaaataaaaccccatggtaaatttctatttttttgtgttaccttggcatctatttttaatcttccttgaacacaccaaattttctcttgaaaaagcttaagttctctctctctctctttgctttgagatgtaaatgtgctatgtattttctctaaaactaggtaaagccttcctcagataaatgttaacctttaccatttacaagacagcaatttgaatccaactatcctttaaaatggtgggttttactgatctcatgcctaaactcctaaaatcaaaattctagaatctttttgtctctctctatctttatgtgaacatatatatgtttcatcacatatatgtatatgtcacacgtttatatactgtttacacatagtatcaaattaatgtaaaaataaatgagtactcacaaattaagtgaataagcccaaatgcttttctatatatgtgattttagtaacctttggtgaatatagatagctttaaaattgttggtaaaataaagtagaaatgtcttcataatttaatttatacacttttgcctatgtctgttggcaggcaggtttatattgtctttactagatgttttaaggtcatcaaagagttgcttgtgtatatatacattttcttaatttgtctgtgagcttatgtctttatatttgaagctttaaattctgagttctagatgagtgaccatagtaagaactggggacaaaacccatcccatcctccagctgtgccttttggccatgctgggagaggtgggattatccaggcattttcttcatagctctgttctttgtcttgggctttgcatctggtacatagttagaatggtttactccctagttttttttctactgaaaataaggctgtataagtctgtttttacattgctacagacaaatacatgaacctgaataatttataaagaaaagagtttgaatggtctcatgattcagcaggttgtagagtaagcatgattctggcatctgctcagattttgaggaggcctcagaaaacttacaatcatggagaaagccagtggtggaggaagacatcttatataatgggagctggaggaagagagcaagggttgcacactggtaaagaaccagataaaactcactgttgctataacagcaccaaggagaatggtgttaacatatgagaaaccacctccatgatccaatcacatccaaccaggctccacctccaactttggagattacaatttgacttgagatttgggtgggggtaaaggtccaaaaaaaattattctctccatcttccctcccaaatctcatgtctttctcacatttaataatataagaatggcttcccaacagtctctagagtcttaactcactcagcattaactcagaagtccaaaatagcaagtttcatctgcgacaaggcaagttccttttacctatgagcctgtaaattcaaacacaagttagttactttcaagacacaatggaagtataggcattgggtaaatactcccattccaaagggaagaaataggctgaaggaaataagatacaggccccatgaaagtctgaaaccttgcagcacagtctttaaaacttaaagctccaaaataatctcctttgaccccatatctcatattcagggcacactgatgtaaggcttaggcttccaaggttctggacatcacaagaacattccaagagagtcacaaaagaatttgtagtgtggcttttgatgctaaacagcatattagaccaagtaagtcactgaagagaaaaaagtcagaggagaagatgggtgagggtgacagaaatggaatggtgaaaggaaaggtctgataaaaaagtttaccggctgggcatggtggctcatgcctgtaatcccagcactttgggaggccgaggtgggcggatcacaaggtcaggagtttgagaccagcctgaccaacatggtgaaaccccatctctactaaaaatacaaaaattagccaggcgtggtggcacgcacctgtaatcccagctactcaggaggctgaaggcaggagaatcacttgaacttgggatgcggaggttgcagtgagctgagattgtgacattgcactccagcctgggtgacagagtgagactccatcccaaaaaaaaaacaaaagtttacccaggggctcatctggtaccttgctctgtgactaatatcttacacattttgatttactcttccactttcattttctgatgcgtgaacggtcacccttctgctgaagatgagaaaagaggctgaggcagctcaaatgagtggtctagagtcatccagctacttcatagagcttgtgtctttcaccttgacgtttgtgcacagacagaaaagagacacagaaggaaggcaaagcaagtttttgttgtgggtgatatttatgaaagttacctgtgttaggcagaataacggactcctaaaatgtttgcaccctagctctggaacctgtgcatttacttttcttggtaaaaacacagtgcaggggtgataaaattaaaatcttaagatgtagatgttattctagattatctgggtgggcccattgtaatcagaagtgtccttgtaagtgacaaagaaaagcaggggcatccgtgtgagaatgatgagcctgtgagactccactggccaatgctgggtgtgagcatgcatcaaaagacaaaattacaactaatgtagttatagattttatttttcatttattatttgaggcagctctcactctacaaatatagtgacagccctccctgggctatacaataacaaaacagtgggttttgtcaagtgggaaccagtaaacaaagccatataaataaataaattggtgaacattagggtacttcaggtcacttttctgtaaaagttaaagcagaggaaacttttattatgctgtctcaggtagagtggaatctcctgttttcaacaaaaaacaaaggtctgttctggtatctctttgcttcattaaaatttcagttgtagactgtagcatttagcatgagtggttctattttggagtctctaggctctcacttaggtgagagtgtgaccaaaatttaaagcattggcattcatctcagtaaccatcatattgggcttccatcatttataggtttatgatgtcttcctgatcacacatttctttgagtttttgtcatttcagccaaagagagaccctttggtatttgttgatggctgcacacaaaactttttaaaaacttttgtagaattcaccacaccaaattgtagaatttaaaaacctgtagaatttatcacaccagagaggctactagtatgactattgggaggataataccaaaagtttggagtatgcactttaggcaagatgcaaaccaagtaaaatagaatagatcaaagaatgagccagaagaatctagcaattttaaccaagtagtatgtttggtaacttttgtgattgagttgttatgatactcgatgtatttgtttatgtgcaacaatcagtgtcagaaactgcacaggctcctccctgttcagctggtagggaacaattttattatgtagcattcgatggctcattaaattaaaacagggaatgagaacgagtctgaaaatgtaactttaaaagggaccactgtacatttgaacaaacaattgtgttaaagatggtgctaatgtcagccattgggtggactaaatgatatcttatgtaaaaatttgagggtgacatgatatatctgtcactctgttacactactctcagaagctacttcatgtgaaattctaatgataccatcatcctgccaagtgaaagaggcaggcataagcatggacaaattaagaggggtaagagcctgattttgatgtggagacttgttctgacaacttgggaaaagcttttgacagtgtgaagttgtcaacttcttatcctggttttaagtttgagtgtctgtagttatggtgtcaaacatattggtgagctctgagtgactcatacttcagacacgagggttttcccgtgaaatttacattgagctttccacctccaacttatagggcttcaggaataaagcagattttgttcttactgattcaataagagaaaattggatgggaggaactagaagaattcagggtctagttcagtctaccggtgaataataaaaactcaaaaacaatgaacagagctgcaatttcatagcaggtatactacactttttattttcaacgttatttttctctctataagaatatctatttttaccaaagataatcccagtaggataaatttgtttccaaagtaggtttagtcttatcaaactttgccgggattctttacataagtgcatcaagagtagcattggaccacagagactcttcctaaagtttgcatcgctagacgtttttataaggagtctcagattaaacttttacaaacctcttgagatgaggaagccaaatgaaggccatcttcagactttgcctgcagtacttatgggtccattctatgtatattctcaaatataacatctcagtcaaagccttggtaatataaccaatgttttgaaatgtgtccttttgtaaagagagaagattcttactaaacttgtgcaaataactgtattagcataaacatatgaatactcatgaatagtttcccaatcctgggacagttaggtaaagagcaaaaataaatgggcttcaattattgtttccaaaagtatactttaccaaattgctttagatatagctagcttaaaagaagaaaaattccataaatctggaaaaaatcatttaaagaatcagcaaattttcaaataaaaattataaaaacattatccacattatcatttatttcaatgaaattatttttgttaagcttggcctaggttggcatatttcatgaaggcatcagcctgtttgttaaagttttggaagtccatagagagtccagtggtataatcttgaactgctcagaaacttgtatgcaagagtacttgtcagtatcttttccataaatcttttgaaatagaagcaattttggactgtagctgattgcagatgctttcaggaagaatcaaaacaactatctgtgaatcaccaacatgtaaaatgactgttgttaaaactctgataagagtttggtataataaagacagtaactccagccagtactccaatcatgatgctgacagtggccccaactgagagaccaaaagaactttcttgtcctgaagcagctgtcatggaaaaaaaaagaagagaaggaataaatgataaagacagctcacatagaaatttagttacttctgtggcatattacattctgactaacttctgtggaatatgacatgattattataataacatattcagtttctaggaatctcataattttggggacactcacatcagtaacatacccataaataaaacttagagaaggtttagcatcacttatcacttatcatttgaaaatgctttttatataatttaacatatcaaataaggtggcttttccatttagcttctgtttctcaactggattagtgagttgttgatgtagcctattaatgaagaaggacaacattatcgagaatgtgaaaaggcaacccatgagatggaaaactatttgcaaattatacatctgataagggattaattttcaaaatattatattcagaatatttcagaagaactacatatcaaaaacagtggggggaatagggagttgttcagtgggtctgcagtttctgtgatgcagaatgagaaagttctagaggtctactgtacagcttggtgcctatacttcatacagattgagtatttcttatgcataagacttaggaccaaaagtgttttggatgtcctactttttttgattttggaatatttgcagtatacttactggtttagcatttcatattttaataattcaaaatccaaatgttccagtgaacatttcttttaagcatcacatcaggggtcaaaatcgttggattttagggcatttcagactttggatttttagatttgggatgctcaatgtttactactaacatttgcatttaaaaattcatcatgagtttggacttcatgtcatgttctgacaatagtaaaatgaaaatttgcaggaaacattttttttctataagtggacactgttattaacggcccaaagatctaagatcgattgctggaagtagtattcatcttgataacataaaaaggtttaggtctgctctgaattccagttggatcacattatgctcaaagaaaggtgctgaagatggtttggaattagcaactccctgggtagtgggaggcatgtgcattctgttgggaggacaggattgatcagagagaaagtcttaggtgtgtcaattacataaagtgaggaatgacgccaaattaagagaagtgatgtgtgttatgttagtgaatttagaaagagctccctgcttctaatttctgtgcagttaggcaaaaaggggaggagcccaaaagaggcatgtgaaatgctttcatcattttctcttgatctcaagaaacactagagtttgattacatttgtttaaattgggcagagtctaagggagacgccagtgcctcatgcatctccccacctgaaggaccccacctttcgacaatggtgtcatcatgaggacacaggtgtgtgtaaaactggcagcaaacccatcagacagcacccacctggccagctccatcctgtcccaggaaccactactattctcattatgtgtatgttacagactttgaagtggtcccacaactccaaaatataaaatatgctattgtcaatacaaaatattggaaagaaagctggataagttgttccacttttttcgcattctttttaaactttgctgtttccgttttagaagtttctgttgacacaccctcaagctagatatttgttcctcagttgtgcccaggctaccaggcttcttcatttatagacttttttttatagcattgtttaaagttctttcttagaatatccatctctctgcctacatcacccatcttttcctgcatggtgtctactttttccttcataactggtaaccagagttgctttaaattttcagtctgataatttcaacatctctgccatatctgtgtctggttctgatccttgctctttcaaaccacattttttttttttttgccatagcctgtcttgtacttttttctgttttttttttttttttgaaagccagacatgatgtactgggtaaaaggaacttgggtgagccggccttcaatgatatagtggtgaatgtggggagggaggagttctgtggtcctgaatgaggtctgttccctgggttgtgaatgtcacaactgcctctcagtattttctcctccttaggtgggatatgatggctagagggggctggagttggacattttcccttcaccaggccagttaagcttccatcaaaccccagctgattcggctatggtaaaacaatctttatgaatacaggtcttgccaggaagaattgaattcactgccatctaagtggttcctccccatcccccacaagaaagatgaggggaattttattgaatattcactgtgaaaacctggtatagttccaggaagtgagagccataaaattgtcctcctaatcccatacctgatccatctgctggagtgtttaactctgtgccttgtccacattgagccttcagcaattcatcagttacagttcagggtttttgactgtgtctggataaggtcagccggtggctaggatgcaaaagacaccccactgagtttctgggcctgggtttctgctcaggtaagacgtgctgctctgtatttacctgtgggtctctccaatttatgggggagttggctctgagaccttgcttctctgagcggtcgaaaagagtttttgatttttaagtttattcatctttctacttgttacaactgagtgacaaccacagcaggatgaggttggagtgaaatgggtaaaataagcctgtgggcattggggactgtagacatgtccttcctctgatcccctggtgagtcagtggagagagtgaaaccacctttgcaaagattacagcagcgagatggagctagtatggcagacttcatcttacctctagctggaggctggctgtccttgctcattcatgggcataggccaggttaaccatgggaggaatttagtttacagtgtaattttgaagcaagaatgataatatccccttactaaaataaactccctcctactcaaggatggtctttgtcaaagtaatacaagaccataacattaggattataggagggaccaaaatcctgctaaaatgtagtcatagtttctataatccattattgctcaggagtcatgtggccagcagtcacaagacttgtgatttctttaattgctcctatagataacatcactattatagattatgagattggtcttttgagatatttctcagacttgcattctggcaaccagctggcctcatccagacccgtgagcaatgcctccagtcatgtggcccccagtcagaggcagatcaaacacacagagacgatttcccccacctgcatgatttcattcccatccaatcaccaggacccattccttagacctcaaactttttgaaaaactccaaccctagccattggggaggttgatttgagtaataataaaataagctcctgtttggcagccttgggctaattaaaatctttctttactacaaatcaccctcttcataaattagttttgcctgcgcagggagcaggatggacctgtcggtcttcctgtcaggtaattataagagtggatggagaaaccactcatttctatctggtggcctgttccatgagtcagcctctcagaaggaaagagccctggaacaggatacagtgaaagctcattctcctggtgacctgaagacaatggctcataatggagcctggcggaagtggcaactctggctaatttcagtgttttttttgggggtggggagggggtgcagtcaggccacagtgtgagcagaaaaggagcagaatagtcagcttttgtctgaggaagtccaaagcatggagaaagatgtgctggacagggcatgccagctagaatgaaggtggagccgggggcagaagatgagggacacagaggagcagagggagccagagacacccatggcagggagcagtgaccccagtgaccaggggcccccagggtctcagttcagtaccagggatccctgaaagccctcccatggcctaggaaccctggagtcacatgagacgaggtagctttagggacagggagtaagagggaaggaacatgggtctcagcacccaagtgatagggaacaggtgtggccagaaacctctaggattctgcatccaggatccggtccctaaagaggttatgaatcattcattccttcattcaatggctccttccctcatgtgagaactacagagtgtgtatctcacactgagcctgtgttagtgtgaatggggagagaaagccaagtcctctcctttattctttcatgggaatgatactgactctttggaaaacacaggatttcaggttccatgaggaggattaggatctgagggaaaggtctggacattcctcctactggctctgacagttgaggcaggtgatttagttctggagtacaaacgaatcagtagtccatttgctctcactcctctgaggtttggatgcctaagaagaaaggatttgagccgacagatgaccatgggctccttagaacttaataagacctcacttctcatggaggagaggatggaggtgtggttacagaaagacctcgtgtgactctgatctgcccctcatgtttgtgtgaccctggttcagtgactgtgtctccctgtggctcagtttcctctcaatcatataagctaaatggtaaatggtctgtgacttgtcgtgttgactctgaatgaactttaaattattcacagtcacctgacctaacgcttggcatagaggaggtgttcacacaaacagtgtttattatttgccttcatgagtgagcaccctcagacctgatccctgtggacaagttgctgccgggaacatcttgtctcttctatttctgtcccaggggacactgaactttctatggggtctcctaagcctcccagggcagttggctgatagcctaagaagcttgtccatctgttcactctgagtctcaggtgaaagagaaggctctgtctttgaccagatgaggctcttggggctgaaccctgcctgggagcagctccagagccacatccatcatacagctggtcaatacttgctcccagtcagtcctgctcaggaggccacaacccagccctggcacaggttttccagggtcacttggattcaggatctgaggactgggttctggggccagggcttctaggcttctaggactgagcttctctataaggatcccaggggacccctcaaaccgggccctgatgtagttctccagggtctttttccgaatcatgttcatgggaagtgcacagggtgatgggctgagactgatctcctcctgctgagtttcccccatcagattgtcctttctctgcagcacgtgtcttcagagtatggatgcaggaaatgaattctgatccattgaaatttgtctaccctgtgtgtgtcctgcactgaatgcccaaacactaaaatgggacataatgcagagggggacacaggcacagcccaggcctaacaatcctgtgggtgcgtgaagtagaactgacccccaacacccagaggtcatgaattcctcacggtgtacacggaaatatccagttgcttcttcaatggtaaaatctgtctttatgatttgtagggtatagaatcctgtgtcatcctgggtgactttccgggtcagcagggatgcattggcaaatattacctcctgactactgtatgcaggtcctgagctagatctttgaatgcctgttgcatatcctaaaattcaatagtagagatccacacttcttcctttgtgccaattgtagcccatcactttcaggggcagattgtgggcaagtagaaaaaactcctcctcctcctcctctgtggcattgaatggcatggcttcagtagtgactctggcagtggtgggtgggttccagaaggttaaaagtgaggctaggatggggagggagcatcagtcaatatcaaaacctatgtattgggatggaaagttggggccctttgtccttagaggttctcttcacccatgagccttggagagagagagaatgtgtgtgtgtgtgtgtgtgtgtgtgtgtgtgtgtgtgtgtgtgtgtgtgtgtgtgtcctgctgggtcaaggtcagcagcatgacccccattccttcaacacctctgaacttggcatttccctgtgtggaatcctcttccccaggggtctgcatggttccctttccactgacctcatatcctgctcacatcagggcatccttgaaagagccctttcttgacacctccactagagattctgggtcttccctttctcacttttccctgctcagttttctccagggctcttgtcaacacctgacctcacattctagatatccttgcgtgtctcgctcccctccccataacagcatcaggttcatgagggcagggacttgtatgatcttggttgtaccgcagtgcctgggacatgctgtggactcttgtgaatgagtttgtgagcattcccagagccctccaaggcctgtgatttatttcccaatttctgaagttggtggctgatgacaatgccttataccctcactatgtttttatatgaagtgttatctgatatagttattatgatcatttttcaaaatgtagtggccagtgatgattaaccgggaatagagaacacttgagatttgtttgcttcttaccataaatttcagttcaatgtgattttcctgttttaatcctgtcccttctggtgtcctcttttctgttaaggcagcagtagaagctctaagtcctctttccccaggagccccattttccccaggagacccaagccagtccctgtgccttctcatttcctcttcaaggaagttctctcctcacctgtgaacatgagcttctgccagaggatgtgccatctggagaaagggactgataggggggcaccatggtctgtgctgcctgcttgtcctcctctgtggagatgagcctgggatccggaaagtttctgagcagggctgtcagctgggctgtccttccaccttctatgctgagcctcttcctggggcaggagcacttctcaggctcatgggtggggtctgtacccaggacacctctctgtgccctcccctctcagtcctgcttccttgtccctcctttctgtttctcttctgtctgtgtttcaggcccctgggaattgctgagtcctctgcctccttcagcagtgattctctcacccaacctctacacacactatgtgcagacacacacacacacacacacacacacacacacacacacagacatcctttaggtttggtaagcacagccctgggccctcagtgtcctcccatttccattgctccaggtcagggtgcacagtcgctccccctgccctctcccattcccatctggcttttctcttcaaagcaggaggctgggctgcaccatgaccctgtcacagtgatgcaccctcaccttgctttgggtgggctgagtgctggctggtgagaaggaccctccctctctttcattatgttgaactttgctacagcttccatggttagacattcgatgacccggttgtccaagagggtattttccttcgtggaggtgtgcaggatcaatctcttatgcctcctggtaggaaaggcctgtgctgattggtcagtggggcctatgggcccagtgttcaccagggacaggtctcagccactctcttggtccctgggttctggtggctgagctggggtgaggcccatccattttcttcctgaccatctttggtgtcctctgtccttggcccagctgactgtcctgtggtcaccccaccttccccacggctggtgcaaaagggagtggggtgatgcccagggtccccacagaacacagctcttcaagacccagagagagagactgggaaagaacaggggctcagagctggagagatttctgcagacttactctgcagccaggatgggcttagcccttcttgctatacatcccttggggttcctcttgagggattgaggcagatcaagctcctctgtgtagaagaagaacaggcagtggctggagagcctgcgtgaagggactttgctcacacctgagagggtgtgtgggggtgggccatgttctgagaacaaaaggagctcataccccccacttcaccttccccatgcacaaaggacagccctgtcttccctcccagcttcacgagagacagcagggggcagattgtgggtgagtagaaaaacctccagcaggtggccacatcatggatggtgcctgtgcgtgaccttcaaacaccctctgcacctcctagcgtgcaatgggcaggtcatagggtgcctggctgattcctaggaatactgtgggcactcaggcagctgctgttctgtgtcagcactgggatcagcctgggataacctagagaaccgtacagagggagtggggtgggaatgtagggagcagtcacagaaaaagttgataaggatggaaagaggtcacaagggtaaagtgcctaatatggcatcatgtggaccatcgctgcccttgcagatgcccttttggctgggtcagcagcccctggggagtcttgtggctgggattctgccatcctctggtgaacatgggggaaatttggatgacagcagccccaggcaaggctgcatgttttattccatgtgaatctgcacatttcacagcagattattcacctatgtcacagatccatcacattccagccccatgagtctcagtctctgtgactgtaagttcactatcctccctctatcacaatcagatgtcccaaacacagatttctgtcacctgtgagtttgtgtttgtgtgcagtgggctgcactgtgtatgccctggggacagtgatgtctgggtggggctgagcactgggcagaggtttggaagcagaagagggaggtgcagggcaggaagatcaatgacagaggagcagagagggagcagggacaagtcatctttgtttctcactcccaggggaccaagaatgcaggaccctgaccttagggctcaacaccacacactgttggtgtccgtggatgtcaccagtgctcgtaatttcatgttgccttggcattcatttattaaggtgtaagtttacctgctttatatcagaggcagggcttggtcaccgtgacagttcccaatactgtacctggccaaatggctgcagttggtggccagagataaaatcttagaggcatctctcctgcttagtgtgctgggctccccctctacccagctgcttcctttaaactgacggttgtgaaatttgccctgaaatttaaagtgaccacctctcagtcacagcgtggtcacctggccccagtgtttgcttgctttaaactcacccattaaagctttctgctggaaacctcagctaacgccttggacccactaaagccattggcctacaggtccctactttcctctctgcctggactccttgacctctgtgtctattatctctaggtgtgccatgtgctcctcagagtctgtaaatagcaaaaaaaaaatttgtactttcacattgtggttgtatcactatagcctcacctgccatctggtgcctgacattgaggctgccccatgggacccatgctggttgagcccctgctggagctcttttcttggggtctctggtgctgctggggacaggcactgtcaggtgatttgatggagaaatggaagagttttattcaaaacagtgtgtcagatgatgttttcatgggcttcagctgctgtaacaaacaccttagtctgggtgacttaaaatttagaaatctatttctcatagttctggagcctgggaagtccaagttcaaggttccagctgattcagtcctggtgagggcttccttgcagattcctgctctcttgctgtatctgcacatggtgcaggcttgaaggtgggtggagagacagaaagaggtagagacccttctcccatgttttcttctatttataaggtcattaactctatcatgaagcctccacttttatgacttagtcttactgtaattatctcccaaaaatgccacctccaaatttcatcacattaaggatgagggctttaacaattttgagggggcacattctgtctggagcaggaaaggtgggagctccttcccctcctgttcatgaggcctgaccttccctggtgagataacttcacattcagtctcattctaggttgcagctccacagagcctgggttctcctctgctcttctgcccattcctgggttttccttcttgcaccaccttctccctgtggccccacctgctcctgttccaggcagctgtccttgcgttgctgctctctcaccatctctggcctcactggcctctgcctttttttttctcagccctgaggccagctccatgggagggaggaagggtgaagctgggatgggttctgaccaggttgctgcccgctatggaagcttgacaatgagggacgctgttgtgtcaccatggaggagtccttaggaaaaggctatttctcaggggtgcctggatcaaaaggggggtggcacttttaatttagctggatctgtgaactacagggactctgctccatgtcagcaaccagcacctccaacttttggtttctctctgtagctgattgtcttgcctgtgataagatcctcctcacaatgactgatggtcacagccgtgtgtggaaacttaatggagggtcttgaatgctcacacagagtgtccagggaacatgcttcctgatgttgagaacgggtgctcagtgtcataaagataaacactgagacaaaggatctctcagaaaggctagtttactttctgcagaaagggtgtcactcgctagcagtcttgccatgacagcacacacaaacaaaggagacagggtcatttataacctgacccgtccaccctactgctatgtccagcttctattggctggaacggacctcccaatttgtacttgacttgattggctagcaacttagaactttcccaaagaggcaaaggcagagaataaaggaagagaggaattaacttgtggaatgctgagagaggcaaaaacattttcaagtagggaaaggaataagcctgacctaatgcttgcttggactggttcaggcatatcagggcaaatatctaagctaaaatgtggggtctaagaacacagagtatattgatttctttattatggctggcagaatttaagaatattagcacaggtctttgagaaaattgtgcttttaagagaggttactatttattttcaattagactgggaggaaaatccctttgaagaggacctctatttatttcattctctacaattctcccctcttttattttataattactcttcaaacttgtttaatatgttttgacttaattgctctgtttgtccttttaagagaagtaatctttttgaatatggtggagagttaggaaacaattttgtgagagtagcagggacaagtttttgtataaagctttgaaaacatttttatttatagttacccaccagaacaacaaagatttaaatctcacagctatttgatttcgtgctttaaatttatctggcacttcttgcgggaccccaatagtgtttatgtaaacctgaggattaaaggatttataaagagtttctttgggcctgcagtgttttgtttttactttttttttttttaaggctgataaaatgccagggtgaaagggatagccaattggattagagcataaatactcctccaattatctggcagagtgtccagtaaaggtccttcacagtactagcatacatttgctcaggggtggctaagcacagactgatgggcaagctcctggaaaggcttgagcttcttgcatccttttatgcttccaaggaacaccaaattctccacttgccatgggaggcacgaactaaacttggcatttagaggtggaagctggattgcccttgggggctgacccacagggtgtcaagctttaggaaacagcagagagagagctcagcatgatggattatcccaagcagtgggattttggtaggatttagcctgtggtagaatcctcctcacaatgactgatggtcacagctgtgtgtgaccatatggtccatacctggttgatgaggagaccatccgagtggaaaggggacaatctgggcgtctgtgcacaagcataacaatcactgttatttaaagtgcagatggaatatttaatccattccagccgggcatttgcattttgatacattgtcttaatggctaaggtttgttttagatctttcacctttgcaatagacaccgtagttttattataggtgtaggagtaagtgggatgggatctaaaactgaggctactgaagaaggggaagatggggaataatgcatatctaaaaaatgcatagggggtgtttcccatttaggtcgatccccataccatagaagcaactaagagtaggtttagagtcagttaaggtggaggtggtgatagagagaaggacagtgttacactgataaggctggcaattagaaggcgtagtccctttagtgaggggttttagatctgcacaaacctcttccgtggaagtccaaccttgcacctgagtagtccataggatgtagtcccagctactacaaggttgccaggctataggagcagaaaattggtgtctcggctgcaggtattcacaaccatgagtgctaggaggaactatgtcaactagagggccggagcataaatatttgtgtgaaaaagctagctgtcattgatccttcacatctttacaaggtatgacagagcatgcattaaaggcaatggtctgagatgagtcagacttagttatgttaataacaaaaggagctagtaacagaataaggaaaggaaaggaagcaatatagaagggatatggaaattaagcttttggttttttttaactttaacttgttaaggcttgatcccggtacactaacctatgattctgatgaggaagatgatttcttgacttaagtatggtgggtccatcttctcttggctgtgcggatggcagtcttggtggtcaactgtacaggataagggccttcccaggcgggcacaagtttcccttctttttaccctctgatgagaacatggtccctgggttagtgctggtgagctagaaattctagcggtggtgtctgtgctaagagatcttttatcttaagagaagaaaaggtagcggagagaccaagtatataatttctgaggaactgatccttagtttcaaacataggaacattagctgaggaatgtaaataaggcaatccatataacattttatatggagacaggcctgtatccttttggggagctgtcctgatccttaataaggcaatgggaagacatttggtccatggtaaatgagtttctagaattaatttagtcagatgattcttaagggtttgatttattctttctacttgtccggaggataagggatgccagggaatatgatattcccattttatgtctagcacttgggccagctttttaataatatgtgcagcaaaatgggtttcattgtttgagtcaatattttctattattccaaacttgggtataatatgctcaattaatggttttaccacattattggcagttgcctcgaaaaggggatggcttctacccagtggttaaggtaattaattattactagcaggtgttttagccgactaatgggtggcattttagtataatcgacttggacgttttggaatggtcttaactccggagttcttcctccgaaaggcaatttcctttcagcttgtttgtcagctttcttacagatgagacagccatttgtgatctgcctgtctagaatataaatgccaatacacctaaagactctgagaatcatgtcacatagggcctggggaccccagtgagtcccttgatgtaaatgggataatacttccctcataaagggtttagatagcatctctctttgatctggaagtatgcagctttcttatgaatttttttttttttttgctttgggatttcaactaatttttctttcccagccagggagaagataggcacaacagtaggagaaggaaggtggggagttaaatgaaaaatgggcatatctaagactgcagcctttttggccatctgatctgcaaggttattccttcggctcttaagggaaaaatcatgttgatgtccaggaatgtgcatgatggctatctactttagtagctggagattatctaagacatgactaatgacttatgagcaagttcttggcccctactatttataagaccttgttcagcctaaatcttcccaaatgtgtgtgctaccctaaaggcatacttagaatctgtgtagatagtttctatctgatcctttaaatattttaaggcctgactgaaggcaaataatttacaagcttgagcagaatagctattgggtaaccatcctgatttaatttcttcgagtgtctctctatctactactgcatatccactgtgttattccccattaaacacccagggggacttgtctatgaataggtgttgccccgatctatagaggcctcagctaaatctggctggacttttgtatggtagtcaattaagttgaggcacaagtgttctgtctgtagcaacggatttcccgtcaagaaccctgcagggttgagtgagttatctgttgttatggttaagtcatttaaatcatccttttttttttaacagaatagccttatattttaaaattctggaatcagtgggccagcttcctgctttttggctcaaaatggtcttgacttgatgagatgtgctcacggtcaaataccccccaaaggttatttttctacttttttctactaatatggctgtggttgcaatagattgaatatactggggccacccactggcaacaggatttaaaatcttagacagaaaagctactggttgtcaccggcctccgtgttcttgagtgagcacccctaaggctactccattgcttacattaacaaaaaggtggaagggcttcttaagagaaggcagagctaaaactggagcagacattagtctatgcttcagtttattaatttgatctacttctttagaggaccacataagggggtcaggccccttattagctaacttttcatataataatttacttcttaatgcataggagtcgatccataatcggcagtatctaattaatcctacaaactttttaagttcttgtttgatccagggcagtggcagggacagaattccttctactcgctcaggaccaattcttcttttgctggtgctaaatggcccatgtatttgacttctggttctacatattggagcttctcttttgagactcgtagcccttcagtgtataaatgatttagaaaatagatggtgtacttatttactttctctatatcctctccaggtataagaatatcatccatgtgttaagtaaacatagctgttttgggatagcagccctctctatgactttctctaaggcatgactaaaagggtttggtgaatctgcaaacccttgatacagaactgtccatctgtattgttgcttctgcccactgtgggggtcctcccactcaaaggcaaacaggtcaggctgttttccactaaaagacatgcccagaagtcatcctctaaatttaagacagtgaactactgattactatatggaattttacttagaatagtgtagggatgggccaggcgcaatggctcatgcctgtaatcccagcactttgggaggccgaggcgggcagatcatgaggtcaagagattgagaacatcctggccacttggtgaaaccccgtctctactaaaaatacaaaaattagctgggcatggtggtgggtgcctgtaatcccagctattcaggaggctgaggcaggagaatcactggaacctgggaggcggaggttgcagtgagccaagattgcaccactacactccagcctggtgacacagtgagactctgtctcaaaataagaaaagaatagtgtagggatttggcatgattgggtgaggagtctgcactatttcattaacagctttaagatcttgcactaatcagtatgacctgttaggtttcttgacaggtaaaatgggagtattatagggagacatgcaaggcttgaggagcccatcttttgtaagtctattacgggcttcaaccctatctgcccttccaaggagataggatactatttattccttacaatctcccctggagtcttcaattttatttggattgggggaatctgtaacctccttcagtttctttcttttggccagacaccaggggaaattttgccatagttagcaaatttagtgaggttaagaaccctcttgggctaacctgttaagggaagagaccacccctcatattgtcttatgcccaatttctacttccaaaagaaagaagaagtaaaaactaaaaggcagaaatgaaatccacaggcagacagcccggcaccgcgccctgggcctggtagttaaagatcgacccctgacctaacaggttatgttatctatagattccagacattgtatggaaaagcattataaaaatccctgtcctgttctgttctgttctgattaccgctgcatgcagcccccagtcacataccccctgcttgctcaatcaatcatgagcctctcacacggacccccttggagttgtgagcccttaaaagggacagaaattgctcactcagggagctcggctcttgagaaaggagtcttgccgatgctcccggccgaataaaccccttccttctttaactaggtgtctgagaagttttgtctgctgctcatcctgctacgctgtagaccaatacctaattttaacattaaatctctccgaagtagattagtttctgctttaggaattaataggaattgaatgttacttgatcaggctttatattttaccttggcactttctaaaatctttgctttaaatccttccccttttactccagagactaacaactcctctggagaatatgttagcccagttggggtaacacatagggaggagcaagtagagcctcagtcgactaagaaagtaattgactcatggttaggtcctacctttaaatttatcaagggctcctggtgggactcgaggtagaaaagaaagagcccctgacaccccccattcctcctctttaaaggcaggaatgagcggaggagctccccctgtaatctgtcacttagggcattatctcttaaagtggcctgagtttccacatttgtaacatctatcttgccctccttttctccctattccggaacttccctgcctctgtcctttttcttctctcttatgtttacaccctttacaacacttgctgtgactgttttcccttcaaccttgattctgtcttctgttttgcatccccaggtcccagggtgtcggccgaaattttgcttctggcattgattgccctggtgaattttgccaaaagatttttgccttttgcttttctttttttcatttcatctctcctgacatatactttctgtgcttcctctaaaagctctttgatggagcgattttttcatctttttattttttgtaacttctttgctatattatgctatttgtgacaaaatgcaattttagcatcccttgtcctggggggctatctagatctaaattagcatactttctcatttgctctcttaatctgtttagaaattgcacaggcccttcatgtttttcttgttgtacatcaaaggccttagtaagattttgaggtcagggtgctgattctttaatccctctaaccgttaattctcgtaaatttttatatggtcttggtgggttgcattattattatcccactgtgggtcttgagtgggaaatttagtatttgccaccggattatcctggcgagcagggtgatcaccttcccaggctgccatagcggctgcgtggattatgtttcgcttctcttttgagaagaggatacctaggatcgacattaactccgtccaggtatactactggggacctaaaaactggtcgatctgttctgccactccttttggatcatctagcaggggcttgagctccctctttaggcctcagacctcagaggcagttaagggagcatttataaagccaatcgtgccctctccttgtggaactttttttagagggaagagctgggaagtcgattctttaggagtgcaaggaaaaggaagattctgaatgtcccttttacattgttctatctctttttggagccctctttttgaggaaggacatttagatgggcagcagagatgatcaagccactgaggcggtaattcctcgggaacagacgcctccaagtccagagtgatccctggagcgggtgggggggacgagacttccgcctgaggaggaggggaggcgggacttctgccggaggaggagtgggaggcgggagttccatctgaggaggagaaggcggcagccatacggcaggcagcagcagcgccgtgggattcagaaacgggaagataatttaaaggatcccactaactgctctgggcctttgtttctgtctgttaccgtctttaagtcatttaaggggtaaagaagggcaggcccttgctgctagcataaggcataatccattttttctggggacatggggctttggttgttaacatacattattaaaagttgacagacccaatcctcatctgaaccaaattttggccagaaaatggcaggttttaaggttggctcttgggtccagaggaaacagcaatatttaatcatctgttgttttctcttatatttagtccgctcatcctctttccaatattatagcatgaatcctaagggactatcaaaggaaatttgatcactgtcccctcccttgttgcctggtctatttcctgtcccaatcctactagaagcatttcccatgttgaatcccagataggcccaatcccttgtgctagggatgttttgcctcttcctttcccaggaaggctgaatcccccagataccggggatgtctcgtctgtcctgtcctcaaggcttaatctctcacaccagaggtgtttcaccgattctctttccctgcgaggttaaccttcctccgtttcccttttggaggttccttacactcttcccgtttatgtccacgcactctgtccagcaacaagttggtaatcgtgcacacacactcagcctcccaaaagctgaccaccaaggaagtactttgctgccctcttgcggcttttcctaccttggcccatgcacggcgttgcctggttactgtggggagtcccgcaagcctgtctctttccccgcgttgctgagaattcaagtatattcctctcaccgggtaggtcccggctctcctcctggggctgccgcaacgggcggcagggcgcctccccacaagacagggccaaagactgtcccagaggggaatgttaatctcgctggggccttcaaattgttggtaacgggtgctcggtgtcataaagatcagcactgaggcacagcatctctcagcaaggctagtttactttctgcagaaaaagtgccgctcgccagcagtcttgccatgaatgcacacacgaacaaaggagacaaggtcatttataacctgatgcatccaccctactgctgtgtgcggcttccaatggctggaacaggacctcacaatttgtacttgactcaaactactacaagtcaaatacagcaaaaatccaaaaacccgaatttaaaagtgaacaaaagactaaaatacttcccaaaggaagacacacacattgccagtgaggacatgcgaggattctcaacatcactaatacttacggatatgcaaatcaaaaccacagtaatacaccacctcacacacattaaaatggctttaataaaaacaacaacaacatgaaaccacaagtgttttcaagtaggtggaaaaattagggctctagtgcattgctgctggtgatgggaaatgttatagatgctgtggaaagtggtatggcagtttctcaataaattaaagaattactacttgatccagcaattctacttctggattctaggttgtgaatgcgttgattatctttagtgaactatagaaagttttctttatctggtgaaaatacactgtaacataataacttagtagataacatgagccctcttgcatgggagagcttttatacaaccagaaccagaaaatatgcattgaaaataacaattgaatgaaatctcattataaaatgtttaaatggaccagcaggtgaccaagtgtacctgaagctttgattgttttcccaggaatatggggccaaacattggttataaattcttttaacaatttataagtcaccacaccaatatattccatttgaatatttttatcttttccatgatgagtcatggaatgcagaacttttaataataaaagctttaaggacttaggaaggacaaggtggccatcctggttctccatgagtccatgcttaattaatattagactcatatcctcttgaatcatagtttttcttcaaattatgtgcatagcactgataactgatgggttatcataggtaatttgacttagaccatgacgttcattcaaattgtatatctaagtaattttaatgtcagctgatgtagcatgagtgctgattggttaggtaggagatgaaatcatgggaagttgaagctgtccttttttgctgagtcagttcctgagtagaggtcacaagatcaaatgacccattttatcgatctgggtggggccagctcatccatccatcaagtgcagggtctgccaaatagctcagacagatctcaggagcagtttagagagggtcagaatcttgtagcctccagctgcatgactcttaaaccgtaatttctaatcttgtggctaatttgttagtcccacaaaggcagtcttgtccccaggcaagaaggaggttcgttttgggaaagggctgttatcgtctttgttttaaactgtaaactaaattcctattaaagttagttcagcctatgcccaggaccgaacaaggacagcttggaggttagaagcaagacggtgttcattaggttaggttagatctctttcactgtctcagtcataattttgccaagatagtttgaggagaatcaaattttaaagaaagacacataatagtgtcacggctagccttaaatattctcttgactaacttacagagcaaaaatctagccttaaacaaagttaagttttttgtaatctcaaatgacttgctttagatctcctgaggcaataaggattaaagccacttcaccatgtcatccagtagttaaaattccacactttcactgttgcagcctggattcaattacaagtcagagaatgaaccgcttttgttacaggaaaaaggtcccaatccatgcccaaagagaggattcttggatcttgcacgagaaagaattcagggcaagtctgcagcgcaaagtaaaagcaagtttattaagaaagtaaagtagtgaaagtacagctactccatagtcacagtaggatgttcttgaaagtaagaggaggcacacacccaccctaggtacagtgctcatatatatggggagatgtaccctgctacaaaggtttgtgataaggattaattttcttaattgtgatattttgcaagaatctaagttattatctttaaagcaaaattaggaatcactttgttttccagatattgggatatctggacactcccaagtctgggtctgtttagtaaatattattgatttgttcccttaaccataaacatctagaggctaggaatgcctcactttctggaaatgcagcccaacaagtcccagcctcattttcccagccctcactcaagatggagtcactctacttcaaatgcctctgccacttttgttttgatatttgtgtgatttttgagtttttgtggtactcatttacatctttggagatgtctcatgcatccttggctaagtcacaattatggttagtgcttatcagtttcagctgggaggatacttttggttaaaaaaaaattcaaaagccagaaatatcagctgtttgtcctagctaaaatctgataataaaaaatctgaaagtattacagtgggtagctagtcagacatcagcaggacaggagggagcctccttcccccacacaccaggaatgtcatgaccatcaggtgattgtcaggtggtcgttaactgtctctctaaaataataatgggttgtagctagcaccagggaaaggcagtctcccaatagacaggaaacacctgaaacagttgatcagctccttcctgataagttctcagaagttgggtgagtgggctaaaacatgtgcattaagaggcaaaatggtggagtttaactggtttgtgacctcccagggacatttgactggaaagagaagaacacctcaagtgagcatgcatacaactccagtaaatacactgcgcatgttcaccccaccccaagtgctagcaggccactgcacatgcagacagcccactccaaagggaaaataaggggagaggagatgcagaccccagaattatgccaacatacaaaagcctaagtcagaggtcaagcaatgcacttgatctcttgttgcctgcttggcttttttatttttttatttttatttatttatttttttgcaacagagtcttgctctgtcacccaggctagagtgcagtggcatgatctcagatcactgcaaccttcgcctcccaggttcaaatgatcctcccgcctcagcctccctagtagctgggactacaggcacatgctaccacacccagctaatttttgtatttttggtagagacgaaatttcaccatgttggccaggttggtctcaaactcctgacctcaggtgatctacccatctcggcctcccaaagtgctaggattacaagtgtgagtcactgtatccagcctgcttgactctcttttaattgtactttacttcctttaattcctgccttaaagcttttaaataaacttttactcctgctctaacacttacctcagtcccttcttctgccttatgcctcttagtcaaattacttcttctaaagaggcaagaattgaggttgctgaagacgtctacagattcactgctgctaacatgctttggtgtcatttctcagctatgtttggcagctaagagaaggatttcccaaaacagctctgtgattaagagtcagcttaattaaaaactggtatttaagccatatatttattaatggtatttaagccatataattattaatatttataatattaagccatgtatatattaaaataatatatatataaaatattatatatatatagaatatgtatatacacagaatatataaattcatattggatatatattgagaaaggacttgaatgtatattgaaggcttttctgcttttctcttttgtatctttttttttttttgagacaggctgtcactctgtcacccaggcttaagtgcagtggcacaatctcagctcgctgcaacctccacctcctgggttcaagggattcttgggcctcagcctcttgagcagctgagattacaggcacgtgccaccacacctgactgatttttgtatttttactagagactgggtttcgccatgttgctggtcttgaactcctggccttgagtaatctgcccgcctcagtctcccaaagtgctgccattacagatgtgagccactgcctctggccatctcttttgtatctttgaaagattttttttcagttgactgaaatctttttaaatcatgtgcttagtctgtctggtttttttcttaaaaattctttttctgcttatttctctttccatccttcctcttgctattcttgatgccacatgagggaacctaaagaatttctgacagcctggaaccccttaaggaaaacagaaaagatgccacagacttccctatttaggagaaaccactgtttttcctcatggaaccccaagagttgtaagtaaatggattcctctcaggtctaaaactctgctctcttttccattttccctgacctctttggcttttgggggcatcagagattactttgcactgtaaaaatgcttgaccttatatgtgtgatggctgctgggtcactggtaagagctttggttttggaggtgactaacagcgctcgcaataaatgattattacttcagaatgctactcatttctttgcaagtttagataagaaatacacagtttaaataattagaaaaatgcccttatagcaaagtacactgtggaagtgttgcatagtatggttccattggcattttcctcttctcagggacctgggattcagtgaaatccttgatttataaaggtctggatgctgtcccttgcaactgggtcttctttttatgtatttaaattattaggatctaaaagttgcaagacttcgttggtcctcttccttaatgggctctgtcctgagctcagtggtccagttggaaaacagagaccaaattaaaagctgcctatctaaataaaattggtctccttataaaatcctatggtaaatttctgtcatttttgtgttaccttggcatctatttttaatcttccttgaacacacacaaattccttcttgtaaaagctttagttctctttctctctgtgctttgagatgtaaatttgctaccaattttctctaaaactcaataaagtctggcttaattaaatgttaacctcttccatttacaaaggcacaaatttaatccaactgtcttttttaaatactgaatttgatcggtcctatgctgaaatcaaaactctaaactctttctgcctccctctatctttatgtgcacatgtgtatgttatatgctgtatcacatatatgtctatgtccatacatatgattatatgttgtttacatacatggtatcaaattaatgtaaaaataagtactcataaattaagtaaataatcccaaatgcttttcaatacatgtgattttagtaatctttggtaaataaagatagtttaaaaattattggtaaaatgaagtagaaatgtcttcagatttaatttagacatttgtgcctgggtctgttggcagacatttttatattgtatttactagatgttttagggtcatcatatggttgcttctgtatatatacattttcttaatttttctgtgaccttatatctttagatttgagcctttagattctgagttctagatgagcgaccatagcaagaactggggacaaaactcatcccatcccacagctgtgccttttggccatgctggaagagattagattctccaggtataatcttcatagctttgctgtttatcttgggctttacacctggtaactagttagaattgcttacttcctgttttttctctcctgaaaataatgctgtatttgtttgttctcacattgctactgagaaatacctgagactgggtaatttataaagaaaagaggttgaattggctcatggtttggcatgactctcacatttgctcagcttttgaggaggcctcgggaaacttacaatcattgtggaaggccaaggcagaacaaggcatctcacaggtgagagcaggaggaagacagcaagggttacacactcttaaccagatcacctgagaactcactgtcactaggaaagcaccaagaggaatggtgttaaaccatgagaaaccatccccataatccaatcaccttcaaccaggctccacctacaactttggagattacaacttgacatgagatttgagtgggaatataaatccaaaacatatcattctttccctggtttctctcaaatctcatgtctttcttttcatacgtgtccgtgtgaagagaccaccaaacaggctttgtgtgagcaacatggttgtttatttcacctgggtgcaggtgggctgagtccgaaaagagagtcagcaaagggagatagggatggggccattttataggatttgggaaggtaatggaaaattacagtcaaagggggttgttctctggtgggcaggggcgggggtcacaaggtgctcagtgggggagcttctgagccaggagaaggaaattcacagggttaatcactcagttaaggtggggcaggaacaaatcacaatggtggaatgtcatcagttaaggcggggcagggccttttcacttcttttgtgattcttcagtaacttcaggccatctgggcgtatacgtgcaagtcacaggggatgcgatggcttggcttgggctcagaggactgacattcctgccttcttatattaataagaaaaataaaacaaaatagtgttgaagtgttggggtggcgaaaatttttggggggtggtatggagagagaatgggcgatgtttctcagggctgcttcaagcgggattaggggcgggtgggaacctagagtgggagagattaagctgaaaggagatcttgtggtaaggggtgatattgtggggttgttagaagaaacatttgtcatatagtatgattggtgatggcctggatacagttttgtgtgaattgaaaaactaaatggaataagaaggagaaaaacaggtataaaaggtctaagaattgggaggacctaggacatctgattagagagtgcctaaggagattcagcatagtcctgccagcaaagattatttatttacttcaagagttaagagtggcagtttggggatagcacgaggagatatcagctgtgatggcttggagaaacagtgtaaactggcagtgtgaacaagagcagggcatgtgtgagtagttgagaatggagaataggaatatgactagacagaaaatagtagggatgacaagttttcttgggggcacagtctaagttggtccagtgtctggaatgagactggggcctaataaaaaggagcatctatacaggagcttaaatgggctgtaccttgtagcattctgaggacaggcctgaattctgagaagtgaaagtggtaaaagtattgtccagtcctttttaagttggtggctgagcttggtgaggtgtgtttttaaaagacctttagtccgttctacttttcttgaagacggaggaccgtaagggatataaaggtttcactgaatactaagagcctgaaaaactaattggctgatttgactaataaaggctggtctgctatcagactgtatagaggtgggaaggctaaactgaggaattatgtctgacagaagggaagaaatgactgtggtggccttctcagaccctgtaggaaaggcctttacttattcagtgaaagtgtctatttagactaagaggtattttagtttcctgactcgggcatgttgagtaaagctaatttgccagtcctgggtgggggcaaattctcgagcttgatgtgtagggaagggagggggcctgaataatccctgaggagtagtagaatagcagatggaacactgagaagttattttcttgaggatagatttccacgatggaaaggaaatgagaggttctgagaggcaggctagtggcttgtactatagcatagcctgcatttgctggtatgtggcgattaggcctggtggaactgccatcaataaatcaagcgtgatcagggtgaggaataggaaagaaggaaatacagggaaatggggtgaatagcaggtggatcagagagatacagtcatgggggtcaggtgtggtatcaggaataatgtgggaggccagattgaagtccgggccaggaacagtggtaattgtgggacttaacaaagagtgagtacagctgaaggagccggggagcagaaagtgtatgcgtcaggtatgaggaagaaaatagattttggaagttgagaaatgtagagagtgagttgagcatagtttgtgattttcagggcctctaaaagtattaaagcagcggcagccgctgcacacagacatgagggctaggctaaaacagtaaggtcaagttgtttggacagaaaggctacagggtgcggtcctggctcttgtgtaagaattctgaccacactaaccatgcctaggaaggaaaggagttgttgttttgtaagggattgaggtttgggagattaatcagacatgatcagcagggaaagcacgtgtgtttttgtgagaattataccgagataggtaacagatgaggatgaaatttgggcttgactgaggtaatgggggctgtctgtgaagccttgcggcaggacagcccaggtaatttgctgagcctgatgggtgtcagggtcagtctaagtgaaagcaaagagaggcggggacgaggggtgcaggggaacagtgaaaaaagcatctttacgatcaagcacggaatagtgagttgtggaggaaggtattgaggacaaaagagtgttcgggttgggcaccacaagggggataggcaaaacaatttggttgataaggcacagatcctgaactaacttgtaagtcttgtctggttttaggacaggtaaaatgggggaattgtaaggagagtttataggctttaaaaggccatgctgtagcaggcgagtgataacaggctttaatccttttaaagcgtgctgtgggatgggatattggcgttgagtggggtaagggtgattaggttttaatgagatggtaaggggtgcatgatcagtcgccaaggagggagtagaggtgtcttatacttgtgggttaaggtggggggatacaagaggaggacgcaaaggaggctttggattgggaagaagggcggcaatgagatatagctgtagtccaggaatagtcagggaagcagataatttacttaaagtgcctcagcctaataagggaactgggcaggtggggataactaaaaaggagtgcttaaaagagtagtgtctaagttggcgccagagttggggagttttaagaggtttagaagcctggctgtcaatacccacaacagttatggaggcaagggaaacaggcccttgaaaagaaggtaatgtggagtgggtagcctccgtattgattaagaaggggatggacttaccctccaccgtgagagttacctaaagctcggcgtccgtgatggtctacggggcttctgaggtgatcaggcagcgtcagtcttcagccggtaagccaagaaggagtcagtcagagagccttgggcccagagttccttgggctctgggagtggctgccaggtgagttgaacagtccgattttcagtggggtcccacacagatgggacgcggcttaggaggaatcccaggctgcgggcattccttggcccagtggccagatttccggcacgtgtagcaagcgcctgggggaggaggttctggaggaacgcctggttgctatggttcaggcgtttggaagttcttgtgtgctggagatgtggctggggtttgtctcacagtggaggcaaggaattgcaacttttttctgttattgcacaccttgaaggtgaggttaattaagtcctgttgtggggtttgagggccagattccaatttctggagttttatttaatgtcgggagcagattgggtaataaaatgtatattgagaataagatggccttttgaccttttagggtctagggctataaagcgtctcagggttgctgtcaaacgagccatgaactgggctggatttttatacttgatgaaaaagagcctaaacgctatctgatttgggataaagaaaaaggagcattaaccttgactatgcctttagctccagccacctttttaagagtaaattgctaggcaggtggggaagggctagtcacggaacgaaactgtaagccggaccaggtgtgaggaggggaggcaataaaaagattacagggtggaggagcggaggctgaggaagaattgggacctagcttggcctggcaaggaggggagaggtcagatgggtctgtagaaaaggaagattagaaagactcagcgacgcttggggttgggactgaggggacaggcgggagatttgggacgagttgcactgggcacagagactaggaagggactgatgtgtaaaagaatgcctggacgtcaggcacctcagaccatttgcccattttacgacaagaattatttagatcttataggatggaaaaattgaaagtgccgttttctggctatttggaactactgtccagtttgtattggggtcaagcggcattgcagaagaaaatgagatgcttagattttaggtcaggtgagaattgaagaggttttaagttcttaagaatacaggctaaggaagaagaaggaggaatggaaggtggaagcttgcccatagtgaaggaggcaagcccagagaaaagagtagagacatggagaaggggtgggggtttcttgcccaccagaaaagcagagaaagggtcggagcatggaaataagggattggggtgcagacataagaggttggggcatggaagtaagggattggggcacagagataacaggttggggcgcggaaataagcaattggggcacagagataagaggttggggcatggaaataagcgattggggcgcagagataagaggttggggcatggaaataagcgattggggggttcttgccccctaggaaagcgggacttaccgctaagggtgaaggagaaggggttgagtggtacttgcccctgccccaggaaagcagagaaggggtggagagaaggagagaaggggttggggtacttgccccacccccggaaaagcagagaaggggtagagacaaggagagaagggttggggtacttgccccttccccagaaaagcagagaaggggtagagacaaggagagaaggggttggggtacttgccccttccccagaaaagcgggacttgccgctaagggtgaaggaccaagacaggcgtccctgcgtggtctgacacctttgaaacgtgggtgaataatcagagaggcgtccctgcaatgattaaacaccaagggaaagctgccttcccagtctgtgaccggcgccggagttttgggtccacggataaaacatgtctcctttgtctctcccagaaaatgaaaggaattgaaattaagagaagggagagattgaagagtggaaaggagaaagtggttgagggacagtgagagaggttggagaagagagtaagaagagaccgcttacctgatttaaaattggtgagatgttccttgggctggtcggtctgaggacctgaggttgtaggtggatctttctcacggagcaaagaacaggaggacaggggattgatctcccaagggaggtcccccgatccgagtcatggcaccaaatttcatgcgcgtccatgtgaagagaccaccaaacaggctttgtgtgagcaacatggttgtttatttcacctgggtgcaggtgggctgagtccgaaaagagagtcagcaaagggagataggggtggggccgttttgtaggatttgggaaggtaatggaaaattacagtcaaagggggttgttctctggtgggcaggggcgggggtcacaaggtgctcagtgggggagcttctgagccaggaaaaggaaattcacagggttaatcactcagttaaggtggggcaagaacaaatcacaatggtggaatgtcatcagataaggcggggcagggccttttcacttcttttgtgattcttcagttacttcaggccatctgggcatatacatgcaagtcacaggggatgcgatggcttggcttgggctcagaggcctgacatttctcacatttcaaaatgtaacaatggttttccaacagtccattacctctttccagcattaccagtaaagtccaaagtcccaagtctcttctgagacaaggcaagtcccttttgcccatgagcctgtgaaatcagaaacaagttatttacttccaagatacaatggggatttaggcattgggtaaatactccaattccaaaaggtagaaataagccaaaagaaataagatacaggccccatgcaagtctgacacccagcagcacagtctttaaaactaaagctccaaaataatctcctttgaccccatatctcacatttagggcacactgatgcaagggttagactcccaaggccctgagaagctctactcctgtggctttgcagggctcaaccctcatggctactctcatgggccggcattgcgtgcctatggcttttccaggtgcagtgtgcaagctgccagtggctcttccattccagggtcttgaggatggtgggtatcttctcccagctcctggcccagtgaaaactgtgtggagacacttaccccacattttgcttctatactgccctagtagaggttcttcatgagggcactgcccttgtagcaggcttctgcctggacattcaggcttttctatatatcctctgaaatgtaggctcccaagcctaaactgttgcactttgtgcacctgcagggttaccaccacatggaagctgccaagctttatgacatgtaccttctgaagcaacaggccgagctgtaccttgacccttttgagccatgactagagcagctgggatgcagtgagcagtgtcctgaggctgcacagggcagcagagccctgggcctggcccaaaatttattctgtcctcctaggcctctggtcctgtgatgggaagggctgctgcaaaggtctctgaaatgcctttaaggccttctccttattgttttggctattagcacttcgctccctttacttatgcaaatttctgcagcctgcttgaattcctcccctgaacatgggcttttcttttctaccacatgctttcctacacactttcagaaaactggatctcatgagaactcactatcataatgacagcaccaaggaagatggtgttaaaccatgagaaacattagtttatttgccaatgtctgaggtaggcaggtgaggacagcgtttgtgctgttgtggaaatgtgttctgaacagggaccttgaagtgaggtggaggaggtggccaagggagagaacactcaggaccccagatggctgctgctgcccaggacatccccgcctcttatggatgttacccagattgtagcagggagaggcttcctttaagtagagagtaaacggactaagaaagcgatagatggctccacatgccaagaatgttcttttccttttctctcccttttctccctctccttttcttttcatgatatcaaatgccagagaggcgtgcagagcacgtagggggccttccttgcgttgctgctacccaagcctgcctgggctgtaagttcccccggagcacccctttgcccccacctgtggcatggtcggcctctcttgggcccaagcctaccctctgcttcctcagagcgggtctcagaccaggcagggggtttcccaggagtccctgggaaggtttgttttctgcagtgccatggtgacataaatggttgctttccttatcatttttcaatatttagtggccactgattactgccttagaaacacggagcaattgaggttttcctgcccctttccaattccagttcaatgtaattttcctgctgtgactcctgtccctctctgatgtcctctcccctattcaggcttcaacagaagccttctatcccctctcaaagctccgtcctccccaggagacaccagccagtctctgtgcttcctcctcccaccctctcccagggagtcctccctcacctgtgagcaggagcccctgccaggggatgcatcctctgcggggaggggctgaggggggcctcatggtctctgctgcctgcttctcttctgtggagaggagcttagctccaggatgatcagagctactgtgactgccagttctgctgtctttcctccctctgtgctgagccttctctcagggcaggagcacttcctagggccaggggcaggggcgggactctgcccaggatgcttctctgtcccctcccctctcagtcctgccttctggttcctgcttccccttcccttctgtgtgtgtttggtccttaggacctgctgaggccatttgccttcttcagatatggctctccttccacacttgtccacacacacacacatatacacacacagagacacacacagagacacacacagagatgcacacacacatacacacagacatgacacaaacacagacacacatatatacagacatacaggcaaacacatatacacatatatacagacatagaggcaaacactcacatatacagacacacacacatatatactcagattcattgaaactgagacacatgtacacatacagatacacagagctgtcacaggacaaactagcacagataaagacttcaagtggctttatttgccgtcctaaaatcgggcgagacttcatcccatgagacaatacgtgggtcaaggagctgagcagaagcgcgggtttaatagagaggggagggctgcggaaagcaaacacaaaaaacagggccactcgggaaaggctcatggaacaagggagaaatctctgatgggggagaatcaggttcctgttttagaaacggtgagagcagaggggaggtcattgtcatgcgattgaaactggcctgtttgggaaatcggctattatctttcgaaggtcaggtagcagctcagttttcctttggtgacctgtgacattggggaaggactgcattgtgctgttggtctggtctgttggggcctggagcaggagctcagccactgccatggcctcctctgactgctgtttagcaaagctctcaggtggggctgatggcgctgtcctggggaggccctttcagtagcaaggctggtgcaaccctgtcccctgggaggatgacccgccctccccagggctgacctctgctatctcctggcctcaggtctgtcagctccacacacagaaccctggggatccaaacctggggaattctttctttgtgatgcagaaacccagctggccaggtctccccatgctctttagtgcttgggaaggtgggatgatgcccagcaggaaggtgacagaggtggctctgggggatagaaaggagctcactgggggatgactggggagggaccagccctctgtctccagtgtcaccagcctggcctctgacccaaagagacccaggctggactcaggtggagctccagctccagggtgtggaggaagttgtcctgtgtgtcctgggtagagaggactgtggtggagggaggtgggtggctctgagccctgctgtccttggggaaggcttcatggagaccctccctttctgtgtctgttggctgagctgtggctcagggcctgtccatgttctccctatgttcaccccttaaccttgcaggtggttgggggggcgagagagatagaaagactgtgtctgtctgtgtgtgtgtgtgtgtgtgtgtgtgtgtgtgtgtgtgtcctgtggctaccacaccttccccatgggtgatgccaggaggaagtggggagctgcacaaaaacccttggcagagcaggcaccatgaaggagcaggcacatggcagggaccagaagggtcatttggggcaagggctggaaaccaggctccacctctacctccttagcaaagccaggttcctgtccaggggaatccatttcctgagtgttatctgtgtgtgatgtcgccccctggagggcaagaggagacttgtggccttgtcaggggctgccccagggacactgaccagggtctgcatggtatgagctggccctgacccctgggcagaagtgggatctgacctccagactgcagggtcaggtcaccccaggtcctgttcactgcaggtccccaggctgcccaactccatgcagtgcaagatgagcccagggagaggacaggagttatccagagaacagcaggtcgagattcaagagaactgtccaccaggaggatgggctgccttagaaggagccacctgtccccaaggtttcaaaggaagggctcagggaggtatctctgggggctttagagagaggatgccagcctgggaggtaggtggtccccagaatgccctgtgttcctccatcacagcactgggggtgctgcctccaggtcaactgtgtccctgtctgatgcccactgtcactgctgttactcaatattgtactggaggcattggccaatgaaattggggtacagatacgaatagagatataagacttagaaagagggagaataagctataccaattcacaaccaatatgtgattatatatctaggaaattccagacatagtgaaaaactaatcaatgcaagaatttaatagaaagatgtaaagttaacataaggaggttaataacttttatacacagaaacaatactcagatagaaggtgtaatataagacctcttttattatgacaatataaagataaaacacctgggcatacccttaacaagaaatttgtaaaacctatacgagaaaactcttaaaacactcctaaaggacacaaaattcatcttcaaaagatgaagagacacatttagtttcttttcgatcactttattatgaaaatgttcaagcacacaaacaaattgaaaaagttgtacagccaacacttacatactcatcatgtagattctgtaattgttaatattttgtagtatttgcttgattaaatattcttacatccatgaaaataaatccatcctattttttcatgtatgtcagagtgagttgcggatctcagtacccttaggccctaaataccccagcactaacgtcattaactagagtttaatatttgtttctatcttaggtgaaatttacataaagtaaaatgcacaaagttgtagtgtaccttttgatgagttttgacaaataagtgcatacacccatgcaaccccttccaagacacacacagttcctgttgccccagtgagttccttcccagccaatcctcatgcccagtcccacctccagaggcaaccatcgtgctgagttttcatcataaattaatgttgtctgtagaagaattccatataaatagaatcatacaatgtgtacgttttcctgtgggttaaattttcttttgctcagcaaaatgtttttgagaatgaagtattttgttgcctctatcagtagtttattactttttttttttttgagacagagtctcgctctgtcgcctaggctggagtgcagtggcatgatctctgctcactgcaagctccgcctcccgggttcatgccattctcctgcctcagcctcccaagtagctgggaccacaagcgcccgccaccacacctggataaatttttttttttaaatatttttagtagagatgggatttcaccttgttagccaggatggtctcaatctcctgacctcgtgatccacccgcctcggcctgccaaagtgctgggattacaggcatgagccaccgggcccggccttgtttattactttttatagcaacataatattcagcagtgtgaatataccacatctggcttattcatcctcctattgatgggtattttgttttaatatttcctcagttttggaccattattattatgaataaatctgcttttaaaaataactttgtgtatgttttggatgggcacagtagctcatgcctgtaatcccagcactttgggaggccaaggaggcactgatcccttaaggccaagagttcaagaccagcctgggagacatgatgaaatctcatctctacaaaataataataataaaacaaaataacatctttgtatgtgtcttgttatgatcacatgtttcattcattttgggtaaaatacctaggaatgaaattgctgggttatggagtaggtatatgtttacttgtataagaaagggacagacttttcccaaagtggttgcatcattttacattctcaacaacagtatatgagagttctggttgctccatatatcctcatcaacatttggggtcttgtctttctactttcaggaatttggttggtgggttgcaacatttgattgtgattttaatttgcatttccctgatgactgatgatgttgagtagtttttttctgtgcatattagctattcgtatatcttattttgtgaagtttctgtgaaaatcttttagtcattattgcattcagaacaaaggattaaaaaaatgcatcgcttgaacccccgaggcagagtttgcagtgagccaagatcgtgccactgcactccagcctgggcgacagagtgagactccatctcaaaaaacaaaaacaaacaaacaaacaaaaaaaagcatgtggaactttagcatgagttgacttcactttgggcatgctgtctttagcagtcacaaaaaaatgaataggcgggtgaactattgtagaatgtaagagatataataaccaaatataaggcataagtcttgattggattccagttttaaaaatacacatggatagccaggcgtggtggcacacacctatagtcccagctactctaaagactgaggcaggaagatcagttgagcctgggaggtggaggttgcagtaagctgagatcctgtcactgcactccagcctggatgacagaacaagattctgtctcaaaataaattaaataaataaatacagatggaaaaatcattttggagaccaaaggggaagactgaaaaaggactatatattagatagggttagggagttattgtttattttctcaggtgtgatcatgggattgtgggccagtcactctggggagaggcacgctaaagcactcaaggacatagtgtcactcaaggacacagtgccttgatgcctgcaatttactctgacacagttcagaaaaaaacgaggaaatatggcaaaatgttaaacttgaatataaggagaggatgcgggtattcttggtattattttttccgcttttctggatgtttgaaattttcataataaaaagttgaaaacaaaggatgatgtgtaagaaagtaacttggtggcatcagaggtcatggatggtggcattggtgcaaagacatcaaggatgggaagggtctagttatacaaagagtagatgaaagacaccccaggcacaggaacagcaagtgcaaaggccctgaggtaggaactagccagcatcacattgtcagccctgcgagtgaccttcctagaaagcagacccttcaggcccagtaaagctgcagatgactgcaccctgactggcttctttactccaacctcatgagactcaccaagtcacaatcacccagcttcataataaaaagctgaaaacaaacactcttcaattcctgccccacagaatttgagaggtaacaaatatctgttgctgttttaagccctgaagccctggggtaatttgctaggcaacaatggataactaatgcagcttctgtcacatcttctaggaaacttcttaacctgctctctcagtacaaaatcccctttctccatttggttccatgtaaacctctgttcatccttcaaaattcacctaaaggagtgtttcccaaaatagggttcaggtgtcagtggctgagggcatgtgagatgattctaaggggttacacacgacagttgttaaaaagcgttacaggctatgcttgtgattaagcgcctattagagaaaaataattgaaaatagcatattaatcacatgattggataaacattattgttttaagatgaggccaaagaaaaacagtgagttgctttaaggaaaatttttgagtaaatagcagtgcaagtgctattcagatcgtaaaagtggaacacgactaaaatttggaagcgcagtgaggaatagcaggaattcctctaggaaaccttccctgccgctccaggtgggccagtttgcccctcattcagacccctaaatacctaaatatctctccacttggcgctggtggaatgtgtcaggatcccatctctggctgatggaagtctgtgaggaggctgtgggctctgcatctgacctgagctccaagtctgcagggcaggccctggggaaggggagatggatggaaagtggggagtaaggacaagccaggagcccacacaaggtggaaggtttcgggacccacagaacctgcctctattcttgctgcctcatcttggtggtgcaggggacctgcaggagtgacctttgtcacagaggtcaacgcacacctggctcaggaggtggagaaactgaaggaggattggggtaaaggtggagcagtttcaggtcctgctgctgctccaggctgaccagccgagctagcagatgagcaacacctggacctgagccacggaagctcctgcctggatttccccagcatgaaatgcacaacggcggctgctttgggcaggtgtgtcccgctcccaccctaacaggaacctacagggaagagagttctgagaggtgtcgttcagcctagccacagtcattgtcaccacaccctcttatgggcctgagcacccttttctgtctgcccttcctgggaatgagaagtccctgagagcggggatgggtctcattcattttggggtcttagtatcattcagcatagggcttggcacagagcaggagctcagggagtgcacagtgaattaatgaatgattcttaaagagcccctacatttaagtaagaaatccatccattgaataagaaatccatccatcacaggttcttcctgtgtccacctgggtggggaaagatggactcatcagtggcctgaaagggatcaagttaagtcaccccaaaatgtaccacgttggtataaggattgttttgagctgaaggccattgagaatcaacagatgctggaagagcactgccctctccttatctacctagaagcagggcatatatttccttttgggaaggtgtttcctccccagaccattaagaaaagcaactcatcctggagatggcgagtccacactgagatgagtatgcatagaccgacctcactaacagaacctgcatctccatcagtgccccaggtatttccgggtcactgtcccatgatgtatcaccctttgaagaacaagcccctttcctttgttaaaatggtatataagccccacaagtctagccgtttcattttttcttttctgtgaactcccatgcatgtaataaaaattctctgccctttctgttgttaattggtcttttgttagtttaattcacaggcctccagatactgaacctaagtggatagaggaaaagcattccctccctgaaaggcagttttccagactaacaaacaaatgtcataagtatgtacatcttccagaaaacggagttgtctagttacatagtatgccctgggcaatggattaatacatgtaacttaggcaattcatctgaatttcagatttttgaaggctaagagctaccttcacaggaccaagtgatggtctctggagtctgggtgttttacagagctccattgatagaaataatctttgcaagaacattgtaggatgatgaataggatctgcttatatctcaagttgtctgggaagcggggacatttgctccttcttatcttgctgggatttctgtcaccagcagttggaagggactccagttttaagacaaaggtttacagtttctttggcaccaagagcaaaagaagcataaaactaggcagaaaggggtataatattatcatgttgagaaaaggaatatggaaaatgtaaccttttgcatctcctgagttaatgaatctatactctgagaagggcagaaatgagaaccacctccccatctctgcaataaattccctagaaggtttggattttagccaagaagtttctgctttcctggagaatgtctctcaattcaaactctaaaccccaaagccagaaaaggcaaacgttaccttgtctgggctttaatccaagttttcagtggctggaaacacggttacactcctggagacaaggtggccttggacacccaggaagagccctgctcccgggcacacctggccctggagccagaccacctgggtttgaaccccagctctgcaccttaccagcagagcttcctgtctggaaagtggagatgatcgtgatatcactgacctcagactgtggttgtctcaattaaattaacaatccatgttatgagtgtacaagtatcgggcacagagcattgactcaattaatactgatctgtaatgaatggggattcatgccaagtgctgatgatgtgcatgacattagtgctgactgctgtaagtactggaagccgtcatgataatgaacagtgactttcatcacagttcatggggtcctttgtgaaacatgagggggcattaagcagaaacagccagcccagccctctccaccaccctttgaggaggtgtatctatgcctggtttacagtgtggaaactgaggctcagagacggggactggattgtgcacggtcacccagtcatgaaggccaagaaatgatggatgggatgcaggctgtgtgctcagccccctccctgtggagcagctcaggggcgtggggcatccagtcgccctgaagatgctgctcttgtctgtctgcctctctctctttccaccacactaggtctctgtttctggctctgtctcctcttcactgtgtgtctgtggttcactttgtgtcttttcatctctgtgtctccctgtctgtctctgtctttgtctctctaccaatgggtaccttctgtctttccttccttcttttcttttcttttctcttctcttcctttcttccttccttcctttcttccttcctttcttccttccttccttcctttcttttctttccagagtctcactctatcacccaggctggagtgcagtgtcatgatcttggctcactgcaacctctgcctcctgggttcaagtgactctcctgcctcagcctcctgagtagctgggattacaggtgtgtgccaccacatccggctaatttttgtatttttagtagagacagggtttcaccatgttggccaggctagtgtcaaactcctaatctcaaatgatccgcccgtctcagcctcccaaagtgctgggattacaggtgtgagccaccactccagcctcttctttctgtttctgtgtatttatgagtgtccttcctcctgcacactgtctgtctctcactctgtatctctccagctctgtccgtctctttttctgggtctctttccctctgtgtctctctgtgcctccctctttgtctctgttctgattttgtgtggccccatcagcttgactatggtggtgtctccatgtccctcctcctcctctcagatgctcttttggttctgtgttttccttctgtctctgtgtccctgtgggggtctcaggaccaggacgagggtgaagtaagtgaggtgtctctgctgcaaaatctaaggagacacccaaatccagggttgcacaagtgaccccttaatttttagtcctaggccctttctctctcccctcactctctctcttttctggattacaacaccattgatttttaatcaagaatccacaagcctgggtcctctcttgtctcaccctagtcctgccctgcatctctctatggctcaccttctacttctccggctctggctcttgagttctccctctctccgtgcctctcctctccctccatctctctatgttagtgtctctgtccccttcactctctgtctctctctgtatctcccctctccacccccgtatttctctgactctgtctctctctgggtctttatcattttctctttctctctccatccctgccccaactctctctgtgtgtttcccagtctctctgttttcccctaagccaggggcttcatgttgtccatctgtattgaggtcttgggtggccagcagggttctctgcttagtgggggcttcccctcagtgctttccatatgctgtccagactgggggtgctgcagctagaaagggaagaaggtttccatatttcctgagactggagtcacatcctgtcaccaatgcactcacctgctgactaaccagtgtacttctgggaattgcaaatgcatgaaatggcacccattctagactagtcacggcagtgttggtgatggtcacagaccgggaacgaccctgacgtttatccatagagaactgggtcatgagccatgatccacatcatggatactggtcagctgtggcaaagaatgaggtatccttctgtctgtgcactggggaaggtttccaagatacaccgcacagtgagaaaaacaagaagcagaacagtgcacggtgtgctacctcttacattacaaaggaggaaatgtaaaattaatttacaaatggccaataagcacatgaaaacatgctcaacatcactaatcattaggaaaataaaaatcacaactacagtgagataccaccttacatccattacgatggttgttctcaaaaaaaaagaaaaacagaaaagaacaagtgttggcgaggagaaattggaacgcttgtgtagtgtttgtgggtatgtgatatggcgcaaccactgtggtcatttctcaaaaaattaatcatagacttaccacaagatgcagcaattcggcttctggtgtattccaaaaagaacggaaagcaggggccccagcagatatttgcacgtctttgttcatagcagcattattcacaatagctaaaagttggaaacaagcccagtgtccatccgtccgtgaatgaataaacaaaacgtggtctatatgtacaaatgaatggaattcagccataacaagaagggtggttctgatggtgcttcaacatgaatgagccttgagttctttctgctaagtgaaataatcagactcaaaaagacaaatttgcatgattccacttaacagaggtgcctaacgtcatgaaatgcatagacagaaaatgaaaaggtggttgtcagtggctggagggagggggaaagaggagttggtgtttaatgggcacagaattccagttggggaatatgaaaaagttctgggtggggatggacagtggtggtggttgaacaacaacctaaatgtacttcctgcccctggatatacacttaaaagtggttaaaatgggctgggcaaggtggctcacgtctagtcccagtactttgggaggttgtggcgggcggatcacgaggtcaggagatcgagaccatcctggctaacatgacaaaataccctctctatctctactaaaaatacaaaaaattagccgggcgtggtggcatgcacctgtagtcccagctactcaggaggttgaagcacaagaatcggttgaacctgggaggtgaaggttgcagtgagccaagatcgtgccattgcattccagcctgggtgacagaacaagaccccttctcaaaaaaaaaaaaaaagaaagaaagaaagaaaagaaaagaaaagaaaagaaaagaaaagaaaaaaagtggttaaaatggtgaattctatgttatatatattttaccataatttacaataattcctattgttttgcataaaacagctgtagaaagctttgcaggtcatgaacagcacagctggccactggggctggtgtggggctaggacctgggtgcacagggaacaggtatgagacacaggctcttcatgcctgcacacacatatggatacacaaggatgcaaatttctgagccatctaaatacaacacctattcaaaaaatcaaacagaaaaaggaaatgaatggagctgaaggatgagggcaggtggggcggctgctcgggaggactctggagaccacttcacccaacattcgaggcctctcttagcagctggagctcatccgggggacttaggagctctggaaagaggaacaggagagggccatggccggaggaggcctgaaaaagatcatctctgccacagagaagatgctggctcggatactggtgtcccccgtggaggcagggagacccagggagacaactgtattcattcaaggaggaatgggtggtggtgcaaacttgggtggaggccacagggtgcagaagacaggacacagcagagatagatgtaggacatggaagggacagaaaggagtgatcactggacgtaaaggggcaaggaaagtggaagcatgagaacatctgctgggcatccggctgagaggttgggtgtccagggtgcccttccctgagggagaacccaggacaggagcagattcagagaaaaccacccagctcactccagcaagaagcagaaaagggactggttaaaggacagggtaggaaggtcaccaagctccaagggccctcatgaagccagcttggaggccacagggcccagggcaaggaccaaaccacaggcacaggacagctccggtcaagatcttctggccactgcaggaggcagaaaccacaccctgcaccctgcactgctgaggctggccctggagtccagaagcttctacaccagaagcttctgtcccccatccccactcaaaaaattaaaaacaaaaagcaaatcggtgccatgcaccctctgcttcctggtgctgttcgggatcctgagtctttcacgggggcacctgatggggaaagcctggacccgtgtctgtgtccctcctgcaaggagtgctgggaaaatgaactttccagcttcctccttgggaagacagaacattccccatgtgtactggtggcatttaaaaactgcacggcagccagagaacatggaccgtgttccaccaggagagttcctggagggatgtcccggtgcagacgcccgtcccaaggtgggtatttgagctgaggaactgagaagccggtttctgcctagagttagagatccgacaggcatcagcacatggaagggagggaagctacgatgcatcgagggtgggagatcagatgaaccaggagaggcagggcccgggaggaaccccggggagcagccgcctttaaagcctgggggaagtagcttcagagaaggtgaggtaggttgggtgggggttgctggaaaaagataattaagaaacaaatttctgctcagcccagaaacccccgtcatatccgtagaagcaaaagaaacctgtcttatgactgagtaagcattaagccaaaatgtgatgcaatctgctaagagatgacaaagacagaaagaaatcccacctttgtatccagccaagcaggtgcaacccgttacacacgtggtctccagatagacggtgactagttcccagttgagaggactcaacggcaccatttgtcacacatagttcatcctaaattcacccagtaactgtgttgattctctgtgtggttaattggctttatccacaggaaaaacaaacctctcttatctatgacaggaggtagttttgcaactgggagtgagatgcccccagaactgaggttccttccttctcacagaaactgggagacaggggcgctttctgcccggatgcctgcctttcaaagagagggctcctatggccttgaggaggacagttctgggttgtgaggcaggcaagatgcttatgtatgctttagaaagctttacatacatcttcaagggacagagaaagaattttcaattacacctcttctaaaaaataaatgctctcaaagtccagcctgggcaacatagcaagatccaatctccacacacacaataataataatcaatttgctgggcacagtgggatgtgcgtgtagtcccagctactcaggaggctaaggaggaaggatcacctgagcccaggaggttaaggctgcagtaagcttggatggcaccactgcactccagcctgggtgacagagggagactctatcaatgaatgaatgaatgaatgaatgaatgaatgaagagaaaatgatctgagtgaaaagaggagagtctctttatctttttgcaacaggctaaacaaaatttttaaaaatgtatatttgcctcacagagattattccaggaaaagaagtggccctcagtgtcaaaggatgcaaaactaacctgtgagttcctggcaggtttagcaataaagcaggatgttgctgatctcagtacaagcaatgttagagaaaggggaagatggaagtggacatggacgagtgagtggcaggtgacaaatggaagcaaagaaacgtatccagaccactgaagatgcttgaccgagaaaaaagaggcggtggagggaatggaagcccaaggaagtcatttgttgcaataagaggcctcagagcacgtgtagggtgcggggcagagcccatgcagaggggctgtggaaggctggtagggtgcaggtggccccactctccatcaccctgaggagtatgtggtcagagttaaagctcagtctgtttctgggatcaggtaagaggtcagcgtccggagaagagaggtggatcttcagatcctgcagacctccaccgcgccctctgtccctcttgactgctttttctccatctccattgtctggctcacattcctgtcacgtcttcctttctccctgcccctcttttctcttttctcctctctttttcttaacccttgtacctttggaagtcccactaatagaatttaaacagcttttcaagttggttttttgttcccagaaattgactttagactctccatgaataatgtggaaatcaaacgagtataagctggttcatgtctctgcaattaaacaaataaaatcaacattccaatgctttcttcttccagagtagcccacatttgattttttttttcttaattactgtcacttgcgatagatttttaaatcttgtaacctggttacacaaataccatggggcaaaagccttacttcctgtgagaggaaaccaggcttgactagcctcatgctggctttgaagaagtaaaatcaggggttgatgaatttgcatagggtaaatatcaaaggtcaaaagtcaacaataggtggtagagggaataccccaaattataaaagaacaaactgtttaagccacaatagaattatcgtagaaataaaccacggtccttcccactaaaatattccacttagaattgtaaaatattttcctcaataactcctggaagagcctattaagaaattaacgaggctgggcgtggtggctcacacctctaattccagcacttttgaaggccgagatgggcagatcacttgaagttaggagtttgagaccagtctggccaatatggtgaaaccccatctctgctaaaaatacaaaaattacccaggcgtggtggcaggcgcctgtaatcccagctactcaggaggctgaggcaggagaatcacttgaacctgggaggcagaagttacagtgagccaagattgtgccattgcactccagcctgggggacaagagcgagacttcatctcaaaaaaaaaaagagtcaaacttgagccaggcatggtggctcacacctttaatctcagcactttgggaagctgatgaagtcaggagttcgagaccagcctgggcaacatgctaataccctgtctctaccaaaaatttaaaaattagatgggtatagtggctcatgcctgtaatcccagctatttgggaggctgaggcacaaggatggcttgaacccgggaggtggagcttgcatttagccaagactgtgccattccactccagtctggagtgaaaaaaaaatccatctcaaaaaaaatcacaaaaagaataaatatggggccttatgactgtatattactgggcttctgacctagactgaaagatcagggaagactttcctgaaaagaaagtgagctatgatgggcccactgtactccagcctgggcaacgtaatgaggctctgtctcaataaaaacatgcagaataaaaccacaataagaaaataagacaataaaaccactacagaactattagaatggctaagattaaaaagagtgaccacgccaagtgttggcaaggatgtggaggcactggaacgctcacgctgctggtgggaatgtaagatggtacaaccactatggaaagcaatctggcagcttctaaaaatttcagcatacaccatgccactcgtcaattccattccattcccacatgatttttatttaaaggaaagtcaagtggaatgatctttaaagcatttttgcctgacaaatagatgaaatgtgggtagcagcccaacactccctggtcagtcttcacagggcatatgtggccttatggcccccaggaaatatggctctttccacaagtgctatgtccactctcttcaccaatcctaagatgttagttccacagcactgctagcattgggctttgtctatttctttctttctttgtcttttttgacagggggtcttgctctatcatccaggctgaagtgcaatgatgcaattttggctcactgcaacctccacttcccaggctcaagagatcattccacctcagcctcccaagtacctgggactacaggtgcacaccaccatgcctggctacttttttatatttttggtagggacggggtttctctatgttgcccaggctggcctggaactcctgagctcatgcgatccgcccgcctcagcctcccagagtgttgggacagcaggcgtgagccactgctcctggagtgggctttatttatttctatttctatttccttttcctgtatggtgaagagattgaaaagcatgccttattttgcaggaagagatggaaggctagaaagaggaagtaaattgttcaggtaatagtgaaatgatagcaggtctagaatatcagcctctttactcaaagcccacaatttccaaatatcacaacttcctttctctttatacactttagggattttatttatttatttatttattattttttgccaaagtgaaactccaggtcaaaggactttgttggtctagtgtcaaattagcttccaaggtgttgatctaatccatggggccaccagcactcaaggatataggcgcacagcaatgtcagcctcatgttgtaatccttttattcatttttgctcctctggtcagtacacgaaggcctgtaaagatcctttcttttatttttgagatggagtctcactctgtcgcccaggctggagtgcaatggcacaatctcagctcactgcaacctccgccccctgggttcaagccattctcctgccccagccaagtagctgggattacaggcacatgccatcatgcccagctaatttttgtatttttagtagagacagggtttcaccatgttggccaggctggtctcgaactcctgacctcaggtgatccacccacctctgcctcccaaagtgctgggattacaggcatgagacaccacacccagccaggcctatgaaaatctttaagtgtaacttttcattaagtgccatagatccctcctctttataacataaagtcctgtaaactgcatgcaggtcagtttgccataggaataatttgtctttgctggaacatgctgggtgcttggcagatgaagagattggaagtgaaccactgagatgactgatgagcgtcctcagcaggctgtgttgcagggggaagagtgcaggttgtttataaggcctgggtcgtgcccctggccaccatttcctggctttgtgactccagctttacttctccttcccagggctcagttttcctctccttgaaggggatgagtggaaccagctctggacgctgagctgcctgggtgtaaaggcttcctgtaatgggcagaagagtggataggagggcagcaggggagctggaccaaaagcatcatgtgatttgccgtgatcacagaggattttctggaagtagcttgggcacaatgtgtgcaaggagacagaagggtctcgtggtggggaataggacattcacacagcctcctccatggcttacctcacacagcagttgttaattagccaagaatttgacaaacaggcattaaaggccttctgaatgtgacacacgacacccagctagaagaatattgccaaaaatcattaaaactactctaatcatagtctgagtcagacacatccaggtggtggaagactttacaaaaaaaaaagaagtgaaccattgctttcaatgacattaaagaaaatgaaaggcaggtggggagcactcctagattaaaggggagtccagagatgagatgtaaaccaaaaggtatctgagacaggtctccatcaacttagaagcttattttgccaaggttaaggacatagaaaaaaccatgcaatcatagaaacagtctgtggtctgtgcctttttccaaagataattttgaggacttcaatatttagggtggaaaagctggctggcggtgaaagaaggagggtgtggtcgcattactgaatccacatggtgtaagagaaagcaggaggtaggggaataatcaatcacgtattcatctcacgctcagtaaattggcaccttgagaaagataaggtgaatatggccgggcgtggtggctcacacctgtaatcccagcactttgaaaggctgaggtgggaggatctcatgagcccaggaacttgagaccagcatggacaacatggcaaaacccatctctacaaaaaaaaccacaaaaattagctgggcgcggtggtgggtgcctgtagtcccagctacacgggaggctgaggtgacagaatgacttgagcccgggagacagaggtcgcagtgagccaagatcgtgccactgcgccccagcttgggagacaaagtatgatactctctcaaaaaaaaataaataagtaaaaatttttttaaagaaagataagatgaacatagagtagctacctacggagatacttaaccttttctctgtagctgtctgcttaggaacaaaaggaaaggcagtttcttgcatgactcagcttccagttttttttttttccttctgtcacagtgaattggggtcctgagtttttgtttctctttcataaagacaacgcagtgcagttcatgcttgaccccggatgttctcctgatcagaaagcaaaaacgcaatgagagatgtcattgggacaacagaggaaaactggaaatgggcttcctattagacaacagtgcatctgtgtaaactacacgggtctgatcctggtctgtggttacgcaggacaaagtccttaagaataatctatataggctgggcgtggtggctcacacctgtaatcctagcactttgggaggccgaggcaggtggatcacctgaggtcaagagctcaggaccagcctggtcaacatggtgaaaccctgtctctactataaatacaaaaattagccggacgtggtggcaggcgcctgtaatcccagctactcgggaggctgggacaggagaattgcttgaacctggagggcggaggttgcagtgagcagagatcacgacacttcactccagcttgggtgagagagcaaaactgcatctaaaaaaaaagagagagagaggaaaaaaaagaatgatatatgctttttaaaaatttttttatttatttattttttgtgatggagcctggctctgtcacccaggctggagtgcagtggtgtgatctcggctcactgctgcaacctccaccaccagcttcaagtgattctcctgcctcagcctcccaagtagctgggattacagttgtgtgtcaccatgtccagctaatttttatatttttagtagagatggggtttcaccatgttggccaggctggtcttgaactcctgacttaaagtgatccttccaaagtgctgggattacaggtgtgagtcactgtgcccagcccccttaagaataatcttaagaaggttcttgctgaagcacttagtggtgagagttacaatgtctactccttgtttttaaaatttaagaatattttaaaagcatatgttgtgtgtgtataaacagatacaataaaatgtgaagagtgggtgaatccagtgaaggggatacttgtgttcactgtactatccttgcaacttttctgccggtttgaaatttttccgtctttttttttgagatggagtcttactctgttgcccaggctggagtgcagtggtgcgatctcggctcactgcaacctctgcctcttgggttcaagcgattctcctgtctcagtctccggagtagctgggactacaggtggctgccactacaccgggctaatttttgtattttttttttaagtagagatggggtttcaccgtgttgtccaggttggtttcaatctcctgacttcaatagatccacccgccttggcttcccaaagtgctaggatgactggtatgagtcaccgctcccagcctgaaatttttcaaaatgaaaacaccgcaggtcaggagtttgagaccagcctgaacaacatagtgaaaccctgtctctattgaaaatacaaaaattaaccagacatggtggtgtgcacctgtagtcccagttactcgggaggctgaggtgggagagttgcttgagtccaggagatggaggctgtagtgacctgcagtgagctacaactgcaccactgtactccagcataggtgagagcaagactctgtttctaaaaaaaaaaaaaaattactgggcatgtactgtatgccatgtaggtggtggagacatagcaggagatcagacaaacacttccctgtctgtgtggcaaatattaaacttgcaataaacttgcaaagacaaataaagataaaatttatagagatgtcaaaaataaacatataattgcaagtcacattcatttctctttctctgctattcctgctctcgccttccctcttctgcttctcctctctccgtcacagacacccacaacgtccctctgcagtcactgacagataccccaggttccttcctgtcttcctccccgccaccccagtgtgttacagctgatttgtacagccctggacaagcccatggttaaatagctagggatttcatcagcctggttggcaaactgtaggtagcttaaaatcagacatgctatgagtatttacaccagagaaataggccaacactacgaggcaggatttgtgggtattgtttttcagaaaacttggtttttcagcacaacactgctctcccatcggcttccagcaaataaatgttgcatttttcagatatatcctaattctttcatagatattcagtctctactccacctctggccaagcctttcctggtggtaggaaactggggacttgagtcctatgttgtactgtgagggtagagaatagaagagaaagcatgagagaaaagcatgaaaagaagaatcaaaagaaagcaatataagaaggaaagagaaagaacagagaagtgggaagacagtggagggtagaaactaggaccggaagacatggggacaagctgatgcccactgcacaacgtcctcacaggtagttgggccatttccccatctggggtacagaggtggccagggagcccatgagaaatgaggaaactgccttcccaaactactggagaaagagggtgggggtggtgatccacatagctgggctcaggaggaaagagggctgggagtctggaccgggggaacctcgggtcaagatgccacagtttctaactatggagggcctgggggcctggactcctgggtctgagggaggagggcctgggggtctggactcctgggtcggagggaggagggcctcggggcctggactcctgggtctgagagagggaggcctggggcctggactcctgggtctgagggaggaggggctggggggctggactcctgggtctgagggaggaggcactgggggcctggactcctgggtctgagggaggagggactgggggcctggactcctgggtctgagggcggaggggctgggggtctggactcctgggtctgaaggaggaggggctgaggggctgggggtcctggaccctccatctgagggaggaggggctggatgcctggacccgaaggtctgaggaagaaagggggtccctgataggccactgcggccattgagacttggggtggggcccaagcctccattttgcaaggccctcccctccccacccttttctgggctggctgcttaagggctggtataaaggacttgtttcctgctgaaaaagcagaaagagattaccagccacagacgggtcatgagcgcggtattactgctggccctcctggggttcatcctcccactgccaggtgagtgatgagcccagcctggaggagattccctggaggccgggcaagggaaccctgctgagatggatttgctcttgccactccaggagtgcaggcgctgctctgccagtttgggacagttcagcatgtgtggaaggtgtccgacctgccccggcaatggacccctaagaacaccagctgcgacagcggcttggggtgccaggacacgttgatgctcattgagagcggtgagaaggccctggcgtgcagagaccccgccctgtcccctcagtcccttgatccctgtgcagggacccgggagccacccctccgggggatcgactcctagggtcccggtgatcccctttccagcctctcagcctacgccgtgtagcagcgtctccctccaggaccctggaggcctgacctccatcctcgcttgcctccctctttcggtccaggaccccaagtgagcctggtgctctccaagggctgcacggaggccaaggaccaggagccccgcgtcactgagcaccggatgggccccggcctctccctgatctcctacaccttcgtgtgccgccaggaggacttctgcaacaacctcgttaactccctcccgctttgggccccacagcccccagcaggtgcctgcgggagggtcgggaggagagggaggggctgctagaaggggatccgctgagcacagaggggctgttacggagtccctcccaccctcgctcgctatcccgaccctcgctggctccatccctcccctgactgctccctgaccatcgccccgccccgctccctttccatccctccccactcactcccgatccctcccaccgacctgccacccgggaatccccgcacccctcctcttctaagagcaaacaggacggatttctgatatgaaatcaccattaactgggttatcctgcattctttttttattctgttgcgtttggttcaagaagttctcctgcagggtttttgctatttcctcttcctaagggagactgaactgtaactttccactttccttgtctggtgttataaagagtctagggagatattttgcgcttcttttattggaacagcttgtgaacacagaagtctcctgttcttggaggtttagtagcgcttgcaggtgaaggcactggctcgttccagggcaccccctcattcccttgaccaatgagtctgcttctgtgtctcccctcggaaggccagactttgttgaaaggttcagacttgaccatgtctgagtctacatttggcctcagcaggcccctcctccaccctgcccaccccccacccccacttgccacccaagacacccccccttttcttttctttttttttttttttttttttttttctgagaaagcgtctcgctgtgtcgaccaggctggagtgcagtggcgcaatctcggctcactgcaacctccgactcccgggttcaagcgattctcctgcgtcagcctcccacgtagcagggactagaggagcctgccaccacgcccggctaatttttgtatttttagtagagacagggtttcactatgttgcccaggctggtcttgaactcctgacctcgtgatccacctgcctcagcctcccaaagtgctgggattacaggtgtgagtcaccacacccagccaagaccactttctgtacccagccctgggtgcctctacccagacctcctgttcattctcccttcctcttttatggattacacttctttattttcccacatccagatcccatgatgggagctgcagaaggcccctttgggaaggctgagcaggttgactcttgaggccagcaaaagtggggtgcagagaaggtatctgatcaaatccagtgccctctcagtgccccctcactctgtctgtcactttcctagacccaggatccttgaggtgcccagtctgcttgtctatggaaggctgtctggaggggacaacagaagagatctgccccaaggggaccacacactgttatgatggcctcctcaggctcaggggaggtaagcctgggacatcggggtccctgtggggactgaactggaaggtctggggactgagatcttaggctttggggagtgaggtgagctgaggcacggcatgagacccagaggagggtgggcctggcttcctggagctatgcctgcctctgagggttgggtggtcctggaggcagcatcactgactctccctcgctccccctttctgcaggaggcatcttctccaatctgagagtccagggatgcatgccccagccagtttgcaacctgctcaatgggacacaggaaattgggcccgtgggtatgactgagaactgcgatatgaaaggtgagtcctgcccctaggctgtgccctggactgcagcctcggggcacgatgacacatggggcatccagagccatcacaccaaagccagcaggaggaaggtcaagggtgcagggtgggttgcttggcatgtggctttaggcaacagtgagtgctggggcccctgctggctctcaagctgctgagagtgactggttgcttcaatttctgtgtctccacacccctggccttgggtaaccctaggtctcccacttccctaggccaccgtagcctctctcccacccgtatcagcccccgccccgctcatggtgctggagtgccccagcagccttgcctgcacaggagagaacatcagagagaaaatcaaggggactttgggtgtgacagagaaagcaagagttaaaggaggacactgagagggtccccacttacccatttaggtgctgccatggaagagagtgccagggaatgtctccataagaagggctccaaagcaacaggaagccatggtggggaggtgggggtcttataggaatcccagcttccctcctagaagcaaagtcttccctgcccctgcctcagtttccttgtctgcccacatcacgctaacccttagagcttagaagagagagttgtgtgagctctgcacacattcctctgtgtatttggctgtttctccctagctaggctgggagcctgaggctaggggcttggtaccactggcaccagggtttccagccttgggtagctcaggagacggctcaggaagggtaccaggaggtgtttgctcaagtgaggacatgcagggctcacttgagcaaagctccctcatgagtcagaccctgtttctacctgaagggcctccaggactaggagggggaggtgctacagacacagatggtcacagcttgaggtgatcagggctgtggcaaacggggatgtggggcctggggcagctcagaggaggaaaatactgatgttgttggggtagagagtcaaggagggctttacagaggaggtggcctgtgaaccgtgtgttaaagatgacctacagcttattggtagaagaggaagaggacattggtggcagagggaacagtgtgtagcagctgcataggcctggaggtgggagtgagcctgctgttttcaagaagagtccctcactccacctgagaaggactcatcaagatgagggggtacagctgggattgggggtgattcgaagttttccaggtggacaaggtgggtgtggggtcgaagagggagctgctccaagccaaaggcacagcaggtgtgaggctgaggaggaaatgaactggcatgccttcagaatggatactggtgggggaggaagagttaagtggggaacctggtggtcgctcaagtacctgaaaacccaggctgaggggtggaccctctcctgaaggcaggggagccatggaagattgtggagcagggagggcagggtctgagccatttatctttccttttgactgatgctgctgttaaggatctggccctggtctctgggaccagatgacactgataacccagaaggtatttcagaaacaaatcagacgcaacacatgccacacacacagcccacaataagcacagcagacacgaatgcgtcacaccatgacacatacacaccacacatcacataccacacacacactcccccatacccctgacataccacctatggaacacaaatcacacacagagcacacaatatgcacaacacacacaaatgcatcacacgagtgcacaattactacgtgtacatgtagtgtgtatgccacatactacacgtcaggtaccacacacactctccctctcaacatatcagacatgcaatacataccacacacaacacacaatacacacaacacatctggcatgccacacacaccacatgcaagcaaaacacagatacacagaacacacaccacaccaaacacacaaaacaaacacataccacatatatcacacacagtatgtctacacatgcacgcaccacacaaacataccatgaacacaccacacaccccatacaaccacaccccccacatgtatactacgcactcacacacagcacacatacctgcacacatcacgcatgtgcacacactacacaaacgcaccacataaaacacagcgactatgcaccaatcagtgctgttcatagagattcatctgctttcaacactggagccagatcttgcaggctgttttgcctccctggtgaagtgcagttcagcagtttagcagacagtgagcatcacaagaccaggcatcagaaactgggggaacaacaagacgttggggaccaagtgcaggagagaagaggcttcagggtgatggaaccgcttataagaagccgcagcagtgggagggctgggtgcaaggatgcaggttactaaaaggggccatggcagcagccccttgtgaagaaccaaggggcccgggcagataaggccctggctgcccctagaggagctgggcagcggtcccagtgagagagcagggaagagcccacgtctgaatcagggacacgtgggtcccaggcccagctctgccgccgaaacagctttccagcctcagcttcacacgaggatcaaaagtctccatatctcatggagcctctttccctggatttggggaagaggaggggatggttgcagacatgggacggaagcagatgcaaagaccatgatgtgggtgagtgcctgccagaaacacctgtgcggagcagagtgatggagggagcagggaggcggccgcgtcttatcaggcctcccgggccattggaagggcttagaattttattctccagaatggggacctcctggagtcttcggagcagaggagtgacatgaactgacttaggtttacctagcctccctctgcctgctgggtggagaatggagcgagaggaacagtgacaggcgggtgcagggattgccccaggagtcaggtgggagtgaagcggggggcttggaggcagcagaggtggtgacgtggggttgggttttgaagattttctgcagctcaagccagtaggattacttgaggaacacaatgtgggagagaaagagcgtggtcaaggacaacaccaatgtgttcagctagactggcagaaacgagccgccacgggtgtaagtaggggagatgggagtggggagagaagggtgggagaagggagcaggagccatgattttgattttgtcatctgtgaagtatgcaaatgagcagccctccagggtggcatcggttctgcaggtcgcatgtgttggtggaagctgggggctcagtctaagagtccctgcatcatgggaccgatcccccctgctctgtgatggccgtgaggggaggccaggggctgtggtttcacactagagccttgagggcctcggggccaaggtagccgaggatggtcttcagtacctgtctccctcctgctcccaaccccgaccctgagggtccagagtccctgggttcccagcctacctctgccactcacaagctgtgtggcatgggcagctactgagcaatcctgcctctgtttcccttgttgcaaatgagggtgttgattgtgatcacaccacctactgctggggtgctgtggggaaatgaggcatcccagataagctgtgttccctggaaccttagatgggtggatctgtgggaagcaatgaggtcagccaggtgcagaggcagtgctcagcggcagtgctcagcccaccctggcccttcgcatcttgtttggaacatagggctttgcaactgaaaggtatgagaaaggtctcaggctgccttccttattattgaaatgaggaccttaaagctcagatggggaagcagagatgggatgaggataaggaagagcttccattgctctcacagctaaagcaaggaacggccgttcccccagggctgtgagaggacgtccctgcgggtgttcaagcagaaacagggaacaatgggggtgggatttcgactcccaagtcccttctgaatccttggttaagggaatctgtggccaggtcacctggagtgtgactcaagagtgtgatcaccttccctagcccaggacgtggagggacagacatggtgggttcctggcttacacacaccctgggattcctctccccagattttctgacctgtcatcgggggaccaccattatgacacacggaaacttggctcaagaacccactgattggaccacatcgaataccgagatgtgcgaggtggggcaggtgtgtcaggagacgctgctgctcctagatgtaggtacgtggactgaggtagaagacgaacacctgtcccaagtccctggcagctccctccaccccactggattctttcccctgaatttcctgctcagctcccttcacatctgcaattttcaatccgactcttcttctctctgcatcttgggttccccttatgaaaactgggggtgaagcagtgggaatgacagtgtctgcctttctggggaggggtgaccacgtatgcggtaatccctgcccagggtggagaaccgtgccaacaccgaggactctcagtggcttcatacattctggaaatgtttatccagcatttgttttaggtgccgcagatccaatcccatctgtattcctgcagctttatatgccttgagaaacaggaaacaaacaaacaaaaagcagcaaagtatggggaatggagatcccagctctgcagagaaatctggcaaggaaaaggagataggaaaagtgaggggaaggctgcaattttaagctcagtgctcaggggagactcatggagaaggtgacctttgagcgagaactgggaggaggcagagcttcgggcaggacccaggccccagcctccgtctttgccccacactaaacatgacccagcagttgtgatcagggcattcaccctctgcctggggggtattgtgaagggcagggagtccagctctggagcccctgctgccctgggagctgcccagtccccagcccagctttccctctcaccctcaggactcacatcaaccctggtggggacaaaaggctgcagcactgttggggctcaaaattcccagaagaccaccatccactcagcccctcctggggtgcttgtggcctcctatacccacttctgctcctcggacctgtgcaatagtgccagcagcagcagcgttctgctgaactccctccctcctcaaggtatgggatccagggccgtggagaaatgaggcccagacacacagagactctggcccaaggtggccagctgctctgagcacaaagtcatgtacccccaccttccctctgctccccagctgcccctgtcccaggagaccggcagtgtcctacctgtgtgcagccccttggaacctgttcaagtggctccccccgaatgacctgccccaggggcgccactcattgttatgatgggtacattcatctctcaggaggtgagtgctgcaagcagggccccaaggatgaaggcactggtggcctggactcctgggtctgagggaggaggggctgggggcctggactcctggtccgagggaggaggcgctgggggcctggactcctggtccgagggaggaggggctgggggcctggactcctggtctgagggaggaggcgctgggggcctgggctcctggtcccagggaggaggggctgggtgcctggactcctggtctgagggaggaggggctgggggccggggctcctgggtctgaggagctgaggctctggactcctgggtctgaggtaggagggactgggggcctggactcctgggtctgagggaggaggggctgggggcctggacccctgggtctgaggagctggagctgggggtctgggctcctcggtctgagggaggagggtctggggcctggactcctgggtttacaacttggctgggctgtactctgtgtcctttctgacttggtcttctccctctaggtgggctgtccaccaaaatgagcattcagggctgcgtggcccaaccttccagcttcttgttgaaccacaccagacaaatcgggatcttctctgcgcgtgagaagcgtgatgtgcagcctcctgcctctcagcatgagggaggtggggctgagggcctggagtctctcacttggggggtggggctggcactggccccagcgctgtggtggggagtggtttgcccttcctgctaactctattacccccacgattcttcaccgctgctgaccacccacactcaacctccctctgacctcataacctaatggccttggacaccagattctttcccattctgtccatgaatcatcttccccacacacaatcattcatatctactcacctaacagcaacactggggagagcctggagcatccggacttgccctatgggagaggggacgctggaggagtggctgcatgtatctgataatacagaccctgtcctttctcccagtgctgggatttctccatgtgagggggcagcaggacacccagggatctagcgtgggggaggagaggagcctaatgagaaaatgaccatctaaagcctgcccttcattggtctggttcacgtctccaaaccagcttggatggtagcagagacttcagggtgctccagccaaacgtatttgggcatcaccatgacctgggaggggaagatgcactgagacgtatgaggcttccagcctagcagccagggccctagcacaaacaggaggctcgccccatctgagcaactgcaggagaggttagtacagtcatgcattgcttaacgacagggacgtgtcgttagaaatgtgtcgttaggtgattttatgaccataggaacattgtagcgtgcacttacaccaacccagatggtacagcccaatacacacccaggatggacgctagagtcgactgctcctaggctacaagcctgcagtgcatgttatggtgtgaatactgcaggcaatcttaacaccacggcaagtatttgtgcatctacacacatctaaacatagaaaaggtacagcataaatacactattgtcatctcagcagaccaccgttctatacgcaattcgtcgctgacccaaacgttgctatgtagcatctgcgtatcgtgggataattgacatgagggcttgagagaactccagaaaaaaatgggttagcattttcccagagctgttatcattgggtctctcttaccaccatagcccaaaaagggtgaggagaagagccactgctggaatctgcagacagagagagagagagagagagagacatagacagaaagagacagagagagctggagagagagccggagacagaaagagagagatattcagagagggttgcctaacaagagctcccatctcaggctgaaaaacgcgtccagcccacaatgatactggggagggaagtggggaactaaaattccaaactgatgtcctcactctggtctccagttgaggttccccattgactgaaccccctagaggccacagaagcaggagactccactggtccagcccccatagatctgccattcacactacagaacagaggagaggagagggaagaggagaagagagcgaatctggagaaggaaacagaacacgtctagtaccgttcactcccttgcccctcggcatccaccctttccctttgtccaaatgaaaatcaaagtccaggacgggctcggtggctcacgcctataatgccagcactttgggaagccgaggtgggaggatcacttgagcccaggagtttgagaccagcctgggcaacatagtgaaaccgcttctctacaaaaaaatacaaaaaataagccgggtgtggtggtgtgcgccccctccctctactggtcccagctactcagaaggctgagtccaggaggtcaaggctgcagtgagccaagactgcaccactgcactccagcctgggcgacagagcaagaccctgtctcaagggggaaaaataaatcagagtcctccgtacagatgacacacaattccagtccttccctctgtcacagtaacagtgtgtgatggtgacagtgatgtcctcctcccattgtgctgggcaccagttcttcacccacaatgagagaaagatggggaggagatggcttccaatacagctgctgaggtcctgggggcggggctgctggtgcttagagctgctttcttccagtacattccacattgtcttcccacttccaaaacctcctttggatgttatttgttacctgcagtgtaacccaaatcttgattcttatggagagtgagtcttggatggccttgtctttagtgggtttctgtagttttccatggaacagggccctggccaaggaaatgttaccgccatgagttgcctgccttcgaaaatagcctccttgtcccagccacccgacctccctctgtaatcagatgccattcccccgactgcagagtgacgtctcctttgcctgctgttttggcagcacaaggggcacaggatggctggagggctgtcatggcttcctgcagatcagaactaggaagagattcctcatccacagcagcccagggccacggggacaaagagcaagcattctctcagtgggctggcaggtgcagtcacgggagggagccgcgcttattcttcctgtctttcctggatctttgcatctggccctggggcgcgtgacccgatagcctggttgctggtttataagatgtgtggcccctcctgtgggtggtggggtacggtctccctcccggtgccctgataagccacacatgagccattgcgccaatctgagaagcagctgtgtctgtatagaggggcacctgagacggtcagtgggttccatgggtgtgagttaattaccccccattctttgcgttaacacgtgtccccagtggaagcaaccctgcatgggttccagagccacaggaaaggcgctgttcacagaagcactgagcagggtccagggaaggccaactggaacccccagtgtgtgcgtatccgtgtgaggacaaagcccagtcccctccaggatgggacgtgtcctgtgtggccagcctatctgcagtggccgggtagtcctcctgtaaaatgacgccttccaggggcttagccccgggctctgcctacactgggcagggctggatacagtgtgcagccaggccagtgctgggagactcagtccacttgtggtaaggtatgtcgccgtcctccctatccatgtggccatctgcacctggaccccctgaacaagctctgagggacagagtctgcctgacaccatccaccaaacaccaagaacctcatccccacagcacaggttctgggcttaagggtggggacggcatagctcacactttgtgcccatccccagaggaacatccatgtgtcctccctgtcttaagtttactcttttattctcttcaagtccttgaccatgtggcccgctctgggttcatgcaatggacccaagtccatccctccttgcagaacccctgaggttctgcccatctgaaggatttcccttcatcactcctcaggaccacctgaagtgggcactaaggcagccgccgtccacttctgctgggcgccagctcaccgtgaggacccatccataagcctggtctgcactttcctcctctgtatgaggtcacagggcttcccaggagctcacagatgtggtagagggaggggcagaaggacaggtgccatgggagcctgagtcacttgctggcctcagacctgcttgagcctgaccccatgctcagctgtcccgtggatgctggaggctgctgtgcatgccccaggttatggtttggtagctcagagagcacccggccctgaacttgattgcacttggcccagggatgagccaagagctgctttccgaatggtcagagttacctgcaggaggaggcgcggaatttctctagaacctccagctctgcactgttaatcttttggagcttgtgaaaatctccataaaataatgcactagatttgaaacatagactctcttacattttttcgtttctaaatatactctaaatatactcatccaggagttatcgagaataatattttgcaattccaactggagtaatgtactgggaagtgctgtggttcatttctttctttctatttttttttttttttttgagatggagtctcgctctgttacccaggctggagtgcagtggcgtgatctttgctcactgcaacctccgcctcctagcttcaagcgattctcctgcgtcagcctcccgagtagctgggattacaggcacccgccaccacgaccggcaatttttttgtatttttagtagagatggggttttgtcatgttggccaggctggtctcaaactcctgacctcaggtgatctgcctgccttggcctcccaaagtgctgggattactggcgtgagcctgtgcttcatttcttttataattctattgtggtttaaatggcccgttgctttcctaatttgtgggtattccctgtatcacctattgtttactttctacctctctgatatttaccgtatatgaatttatcaatcctgattttacttcttcaaagccagtatgagtttagtcaagtctgatttccccgtacaggatgaaaggtttttgtgggcgtcaagcaagaacattgtaggatgctgaataggatctgtatacatctcaagttgtctaggaagcagggacatttgctccttcttatcttgctgggatttctgtcactagcagttggaagggactccagttttaagacaaaggtttacaatttctttagcaccaagaaaaaaagaagcataaaactggagagaaaagggtataatattatgttcagcaaggaatatggaaaatataatcttttgaatcttctgagttaattaatctgtactctgagatgggcagaaatgagaaccacgtccccatctctgcaataaattccctaggtttggattttagccaagaagtttctgctttcctggagaatgtctctgaatttaaacaccacacctcaaagccagaaaagggaaagtttactttgggctttgatccaagttttcagtggctggaaacacggttacactcctggagacaaggtggccttggacacccaggaagagccctgctcctgggcacacctggccctggagccagaccacctgggtttgaaccccagctccgcaccttaccagcagagcttcctctctggaaagtggagatgatcgtgatatcactgacctcagactgtggttgtctcaattaaattaacaatccatgttatgagtgtacaagtatcgggcacagagcatcgactcaattaatactgatctgtaatgaatggggattcatgccaagtgctgatgatgtgcatgacattagtgctgactgctgtaagtactggaagccgtcatgataatgaacagtgactctcatcacagttcatggggtcctttgtgaaacatgagggggcattaagcagaaacagccagcccagccctctccaccacccttgaggtggtgtatctatgcctggtttacagtgtggaaactgaggctcagagacggggactggattgtgcacggtcacccagtcacgaaggccaggaaatgatggatgggatgcaggctgtgcgctcagccacctccccgtggagcagttcaggggcactgggcatcgggtcgccctgaagatgctgctcttgtctgtctgcctctctctttccaccgcactgggtctctgtttctggctctgtctcctcctcactgtgtgtctttggctcactttgtgtcttttcatctctgtgtctccctgtctctctctgtctttgtctccctctcacttggtcccttccttcctttcttccttccttccttccttccttctttctttctttctttctttcctttttctttcttattataacaccattgatttttaatcaaggatccacaagcttgggtcctctcttgtctcaccctagtcctgccctgtgtctctctacggcacaccttttacttctctggctctgactctctgagttctccctctgtccatgcctctcccctccctccatctctctgtgttagtgtctctgtaccctttcctctctgcctctctctgtatctcccctctccacccccatatatctctgactctgtctctctctgggtctttatcattttctctttctctctccatccctgcccccattctctctctgcctttctcgatctctctgtttctcaccctccttctgccttcccctaagccagggacttcatggctctgatggctgtccagcggtgttgcccatttttattgaagtatccttctgtcgacccacttggaaagacttccaagatacactgcacagtgagaaaaacaagaagcagaacagtgcacagtgtgccacctctggcattacaaaggaggaaatgtaaaatgaatttataaatggccaataagcaaataaaatttggtcaacatcacttatcattaggaaaatggaaatcaaaaccacagtgagataccaccttacatctgttctgatggcagttctgaaaaaaaaaaaaaaaaaaaaaacaaagtgttggcgaggagaaattggaatgcttgtgcagtgtttgtgggtatataatatggcacaaccactgtggtcatttctcaaaaaattaatcatagacttaccacacgatgcagcaattctacttctggtgtattctgaaaagaactgagagcaggggccccagcaggtatctgcatgtctttgttcatagcagcattattcacactagccaaaggtgtaaacaagccaaatgatatggctttcctctgtccgaacacaaatctcacgttcagctgtaattcccaaaggtcgaaaatagcctccttgtcccagccacctgacctccctctgtaatgagatgccgttcccccgactgcaagtgactcaggctcccatggcacctgtcctcctgcccctccctctaccacatctgtgagctcctgggaagccctgtgacctcatacagaggaggaaagtgcagaccaggcttatggatgggtcctcacggtgagctggcgcccagcagaagtggacggcggctgccttagtgcccacttcaggtggtcctgaggagtgatgaagggaaatccttcagatgggcagaacctcaggggttctgcaaggagggatggacttgggtccattgcatgaacccagagcgggccacatggtcaaggacttgaagagaataaaagagtaaacttaagacagggaggacacatggatgttcctctggggatgggcacaaagtgtgagctatgccgtccccacccttaagcccagaacctgtgctgtggggatgaggttcttggtgtttggtggatggtgtcaggcagactctgtccctcagagcttgttcagggggtccaggtgcagatggccacatggatagggaggacggcgacgtaccttaccacaagtggactgagtctcccagcactggcctggctgcacactgtacccagccctgcccagtgtaggcagagcccggggctaagcccctggaaggcgtcattttacaggaggactacccggccactgcagataggctggccacacaggacacgtcccatcctggaggggactgggctttgtcctcacacggatacgcacacactgggggttccagttggccttccctggaccctgctcagtgcttctgtgaacagcgcctttcctgtggctctggaacccatgcagggttgcttccactggggacacgtgttaacgcaaagaatggggggtaattaactcacacccatggaacccactgaccgtctcaggtgcccctctatacagacacagctgcttctcagattggcgcaatggctcatgtgtggcttatcagggcaccgggagggagaccgtaccccaccacccacaggaggggccacacatcttataaaccagcaaccaggctatcgggtcacgcgccccagggccagatgcaaagatccaggaaagacaggaagaataagcgcggctccctcccgtgactgcacctgccagcccactgagagaatgcttgctctttgtccccgtggccctgggctgctgtggatgaggaatctcttcctagttctgatctgcaggaagccatgacagccctccagccatcctgtgccccttgtgctgccaaaacagcaggcaaaggagacgtcactctgcagtcgggggaatggcatctgattacagagggaggtcgggtggctgggacaaggaggctattttcgaaggcaggcaactcatggcggtaacatttccttggccagggccctgttccatggaaaactatagaaacccactaaagacaaggccatccaagactcactctccataagaatcaagatttgggttacactgcaggtaacaaataacatccaaaggaggttttggaggtgggaggacaatgtggaatgtactggaagaaagcagctctgagcaccagcagccccgcccccaggacctcagcagctgtattggaagccatctcttccccatcttcctctcattgtgggcgaagaactggtgcacagcacaatgggaggaggacatcactgtcaccatcacacactgttactgtgacagagggaaggactggaattgtgtgtcgtctgtacggaggactctgattattttttcccccttgagacagggtctcgctctgtcccccaggctggagtgcagtggtgcagtcttggctcactgcagccttgaccttctggactcagccttctcagtagctgggaccacaggcgtgcaccaccacacccggctaattttttgttgtcttagtggagactggatttcacggtattagccaggatggtctcaatctcctgacctcatgatctgcccgcctcggcctcccaaagtactgggactacagacaggcacgcaccaccacacccggctaattttttgtattttttgtagagaagcagtttcactatgttgcccaggctggtctcaaactcctgggctcgagtgatcctcccacctcagcttcccaaagtgctggcattacaggcgtgagccaccgagcctgtcctggactctgattttcatctggacaaagggaaagggtggatgccgaggggcaagggagtgaacggtgctagacgtgttctgtttccttctccagattcactctcttctcctcttccctttcctctcctctgttctctactgtgaatggcagatctatgggggctggaccagtggagtctcctgcttctgtggcctctagggggttcagtcaatggggaacctcaactggagaccagagtgaggacatcagtttggaattttagttccccacttccctccccagtatcattgcgggctggacgcgtttttcagcctgagatgggagctcttgttaggcaaccctctctgaatatctctctctttctgtctccggctctctctccagctctctctgtctctttctgtctatgtctctctctctctctctctctctgtctgcagattccagcagtggctcttctcctcaccctttttgggctatggtggtaagagatacccaatggtaacagctctgggaaaatgctaacccatttttttctggagttctctttagcccttatgtcaattatcccacaataggcagatgctacatagcaacgtttgggtcagtgacgaattgcgtatagaacggtggtctcctgagatgacaatagtgtatttatgctgtaccttttctatgtttagatgtgtatagatgcacaaatacttgccgtggtgttacgatgcctgcagtattcacaccataacatgcactgcaggcttgtagcctaggagcagtcaactctaccatccatcctgggtgtgtattgggctgtaccatctgggttggtgtaagtgcactctacaatgttcctttcgtgataaaatcacctaacgacacatttctaacgacacgtccctgtcgtaaagcaatgcatgactatactaacctctcctgcagtcgctcagatggggccagccccctgtttgtgctagggccctggctgctaggctggaagcctcatacatctcagtgcatcttcccctcccaggtcatggtgatgcccaaatacgtttggctggagcaccctgaagtctctgctaccatccaagctggtttggagacatgaaccagaccaatgaagggcaggctttggatggccattttctcattaggttcctctcctccaccatgctagatccctgggcgtcctgctgtccccttacatggagaaatcccagcactgggagaaagcacagggtctttattatcagacacatgcagccactcctccagtgtcccctctcccacagggcaagtccggctgctccaggctctccccagtgttgctattaggtgagtagatatgaatgattatgtgtggggaagatgattcatggacaggatggggaaataatctggtgtccaaggccattaggttacaagcacaagggacggttgagtgtggtggtgagcagcggtgaagaatcgtgggggaaatggagttagcaggaagggcaaaccgctccccaccacagcgctggggccagtgccagccccaccccccaagtgagacactccaggcccccagccccacctccctcatgctgagaggcaggaggcggctcatcacccttctcacacacagagaagatcccaatttgtctggtgtggttcaacaaggagctggaaggttgggccacacagccctgaatgctcattctggtggtcagcccacctagagggagaagaccaagtcagaaaggacacagagtacagcccagccaaattcataaacccaggagtccaggccccagaccctcctccctcaaacgcaggagctcagacccccagcccctcctacctcagacccaggagtccaggcccccagccccttctccctcagtcccaggagcccaggacaccagcgccttcatccttggggccctgcttgcagcactcacctcctgagagatgaatgtacccatcataacaatgagtggcgcccctggggcaggtcattcggggggagccacttgaacaggttccaaggggctgcacacaggtaggacactgccggtctcctgggacaggggcagctggggagcagagggaaggtgggggtacatgactttgtgctcagagcagctgcccaccttgggccagagtctctgtgtgtctgggcctcatttctccacggccctggatcccataccttgaggagggagggagttcagcagaacgctgctgctgctggcactattgcacaggtccgaggagcagaagtgggtataggaggccacaagcaccccaggaggggctgagtggatggtggtcttctgggaattttgagccccaacagcgctgcagctttaggtcgccaccagggttgatgtgagtcctgagggtgagagggaaagctgggctggggactgggcagctcccagggcagcaggggctccagagctggactccctgcccttcacaataccccccaggcagagggtgaatgccctgatcacaactgctgggtcatgtttagtgtggggcaaagacggaggctggggcctgggtcctgcccgaagctctgcctcctcccagttctcgctcaaacgtcaccttctccatgagtctcccctgagcactgagcttaaaattgcagccttcccctcacttttcctatctccttttccttgccagatttctctccagagctgggatctccattccccatactttgctgctttttgtttgtttgtttcctgtttctcaaggcatataaagctgcaggaatacagatgggattggatctgcggcacctaaaacaaatgctggataaacatttccagaatgtatgaagccactgagagtcctcggtgttggcacggttctccaccctgggcagggattaccgcatacgtggtcacccctccccagaaaggcagacactgtcattcccactgcttcacccccagttttcataaggggaacccaagatgcagagagaagaagagtcggattgaaaattgcagatgtgaagggagctgagcaggaaattcaggggaaagaatccagtggggtggagggagctgccagggacttgggacaggtgttcgtcttctacctcagtccacgtacctacatctatgagcagcagcatctcctgacacacctgccccacctcgcacgtctcggtattagatgtggcccaatcagtgggttctttactcaagttttcctgcttcttcaaggtggtcccccgatgacaggtcagaacatctggggagaggaaacccagggtctgtgtaagccaggaacccaccatgtctgtccctccacgtcctgggctagggaaggtgatcatgctcttgagtcacactccaggtgacctggccacggagtccctcaaccacggattcagaagggacttgggagtccaaaccccacccccattgttccctgtttctgcttgaacacccgcagggacgtcctctcacagccctgtgagaacagccattccttgcttcagctgtgagagcaatggaagctcttcctgagcctctgcccatctctgcttccccatctgagctttaaggtcctcatttcaataataaggaaggcagcctgagacctttctcatacctttcagttgcaaagccctatgttccaaacaagatgcgaagggccagggtgggctgagcactgccgctgagcactgcctctgcacctggctgacctcattgcttcccacagatccacccatctaaggttccagggaacacagcttatctgggatgcctcatttccccacagcaccccagcagtaggtggtgtgatcacaatcaacaccctcatttgcaacaagggaaacagaggcaggattgctcagtagctgcccatgccacacagcttgtgagtggcagaggtaggctgggaacccagggactctggaccctcagggtcggggttgggagcaggagggagacaggtactgaagaccatcctcggctaccttggccccgaggccctcaaggctctagtgtgaaaccacagcccctggcctcccctcacggccatcacagagcaggggggatcggtcccatgatgcagggactcttagactgagcccccagcttccaccaacacatgcgacctgcagaaccgatgccaccctggagggctgctcatttgcatacttcacagatgacaaaatcaaaatcatggctcctgctcccttctcccacccttctctccccactcccatctcccctacttacacccgtggcggctcgtttctgccagtctagctgaacacattggtgttgtccttgaccacgctctttctctcccacattgtgttcctcaagtaatcctactggcttgagctgcagaaaatcttcaaaacccaaccccacgtcaccacctctgctgcctccaagccccccgcttcactcccacctgactcctggggcaatccctgcacccgcctgtcactgttcctctcgctccattctccacccagcaggcagagggaggctaggtaaacctaagtcagttcatgtcactcctctgctccgaagactccaggaggtccccattctggagaataaaattctaagcccttccaatggcccgggaggcctgataagacgcggccgcctccctgctccctccatcactctgctccgcacaggtgtttctggcaggcactcacccacatcatggtctttgcatctgcttccgtcccatgtctgcaaccatcccctcctcttccccaaatccagggaaagaggctccatgagatatggagacttttgatcctcgtgtgaagctgaggctggaaagctgtttcggcggcagagctgggcctgggacccacgtgtccctgattcagacgtgggctcttccctgctctctcactgggaccgctgcccagctcctctaggggcagccagggccttatctgcccgggccccttggttcttcacaaggggctgctgccatggccccttttagtaacctgcatccttgcacccagccctcccactgctgcggcttcttataagcggttccatcaccctgaagcctcttctctcctgcacttggtccccaacgtcttgttgttcccccagtttctgatgcctggtcttgtgatgctcactgtctgctaaactgctgaactgcacttcaccagggaggcaaaacagcctgcaagatctggctccagtgttgaaagcagaagatgaatctctatgaacagcactgattggtgcatagtcgctgtgttttatgtggtgcgtttgtgtagtgtgtgcacatgcgtgatgtgtgcaggtatgtgtgctgtgtgtgagtgcgtagtatacatgtggggggtgtggttgtatggggtgtgtggtgtgttcatggtatgtttgtgtggtgcgtgcatgtgtagacatactgtgtgtgatatatgtggtatgtgtttgttttgtgtgtttggtgtggtgtgtgttctgtgtatctgtgttttgcttgcatgtggtgtgtgtggcatgccagatgtgttgtgtgtattgtgtgttgtgtgtggtatgtattgcatgtctgatatgttgagagggagagtgtgtgtggtacctgacgtgtagtatgtggcatacacactacatgtacacgtagtaattgtgcactcgtgtgatgcatttgtgtgtgttgtgcatattgtgtgctctgtgtgtgatttgtgttccataggtggtatgtcaggggtatgggggagtgtgtgtgtggtatgtgatgtgtggtgtgtatgtgtcatggtgtgacgcattcgtgtctgctgtgcttattgtgggctgtgtgtgtggcatgtgttgcgtctgatttgtttctgaaataccttctgggttatcagtgtcatctggtcccagagaccagggccagatccttaacagcagcatcagtcaaaaggaaagataaatggctcagaccctgccctccctgctccacaatcttccatggctcccctgccttcaggagagggtccacccctcagcctgggttttcaggtacttgagcgaccaccaggttccccacttaactcttcctcccccaccagtatccattctgaaggcatgccagttcatttcctcctcagcctcacacctgctgtgcctttggcttggagcagctccctcttcgaccccacacccaccttgtccacctggaaaacttcgaatcacccccaatcccagctgtaccccctcatcttgatgagtccttctcaggtggagtgagggactcttcttgaaaacagcaggctcactcccacctccaggcctatgcagctgctacacactgttccctctgccaccaatgtcctcttcctcttctaccaataagctgtaggtcatctttaacacacggttcacaggccacctcctctgtaaagccctccttgactctctaccccaacaacatcagtattttcctcctctgagctgccccaggccccacatccccgtttgccacagccctgatcacctcaagctgtgaccatctgtgtctgtagcacctccccctcctagtcctggaggcccttcaggtagaaacagggtctgactcatgagggagctttgctcaagtgagccctgcatgtcctcacttgagcaaacacctcctggtacccttcctgagccgtctcctgagctacccaaggctggaaaccctggtgccagtggtaccaagcccctagcctcaggctcccagcctagctagggagaaacagccaaatacacagaggaatgtgtgcagagctcacacaactctctcttctaagctctaagggttagcgtgatgtgggcagacaaggaaactgaggcaggggcagggaagactttgcttctaggagggaagctgggattcctataagacccccacctccccaccatggcttcctgttgctttggagcccttcttatggagacattccctggcactctcttccatggcagcacctaaatgggtaagtggggaccctctcagtgtcctcctttaactcttgctttctctgtcacacccaaagtccccttgattttctctctgatgttctctcctgtgcaggcaaggctgctggggcactccagcaccatgagcggggcgggggctgatacgggtgggagagaggctacggtggcctagggaagtgggagacctagggttacccaaggccaggggtgtggagacacagaaattgaagcaaccagtcactctcagcagcttgagagccagcaggggccccagcactcactgttgcctaaagccacatgccaagcaacccaccctgcacccttgaccttcctcctgctggctttggtgtgatggctctggatgccccatgtgtcatcgtgccccgaggctgcagtccagggcacagcctaggggcaggactcacctttcatatcgcagttctcagtcatacccacgggcccaatttcctgtgtcccattgagcaggttgcaaactggctggggcatgcatccctggactctcagattggagaagatgcctcctgcagaaagggggagcgagggagagtcagtgatgctgcctccaggaccacccaaccctcagaggcaggcatagctccaggaagccaggcccaccatcctctgggtctcatgccgtgcctcagctcaccctcactccccaaagactaagatctcagtccccagaccttccagttcagtccccgcagggaccccgatgtcccaggcttacctcccctgagcctgaggaggccatcataacagtgtgtggtccccttggggcagatctcttctgttgtcccctccagacagccttccatagacaagcagactgggcacctcaaggatcctgggtctagggaagtgacagacagagtgagggggcactgagacggcactggatttgatcagataccttctctgcaccccacttttgctggcctcaggagtcaacctgctcagccttcccaaaggggccttctgcagctcccatcatgggatctggatgtgggaaaataagtgtaacccatgaaagaggaaggcagagagatcaggaggtctgggtagaggcacccagggctgggtacagaaagtggtcttggctgggtgtggtggctcacacctgtaatcccagcactttgggaggctgaggcagatggatcacgaggtcaggaattcaagaccagcctggccaacatagtgaaactctgtctctactaaaaatacaaaaattagccgggcgtggtggtgggctcctccagttccagctacttgggacgctgaggcaggagaatcgcttgaacctgggagtcggaggttgcagtgagccgagattgcgccactgcactctagcctggtcaacacagcgagacgctttctcagaaaaaaaaaagggaggggtcttggggggcaagtgggggtggggggtgggcagggtggaggaggggcctgctgaggccaaatgtagactcagacatggtcaagtctgaacctttcaacaaagtctggccttccgaggggagacacagaagcagactcattggtcaagggaatgagggggtgccctggaacgagccagtgccttcacctgcaagtgctactaagcctccaagaacaggagacttctgtgttcacaagctgttccaataaaagaagcgcaaaatatctccctagactctttataacaccagacaaggaaagtggaaagttacagttcagtctcccttaggaagaggaaacagcaaaaaccctgcaggagaacttcttgaaccaaacgcaacagaatagaaaaggaatgcaggataacccagttaatggtaatttcatatcagaaatccgtcctgtttgctcttagaagaggaggggtgcggggattcccgggtggccgaggtcggtgggagggatcgggagtgagtggggagggatggaaaggaaggggggcggggcggctgccagggagcagtcaggggagggatggagcgagcgaggggcacgatagcgagcgagggtgggagggagctgaagaggtaaagagggtgctgtccctgtggcaagggtctcccattgttcaagggcaattctctagagaaggggcacctgtgagatgttttcagccaacaccagctggccaaggggatgtgggtaggatatgccttatccactccagagctggagacacactggattccaggggccagttcctaaccactacaccatgcctggatgcatgtgtgtcacttaatttcataacgtgaacagagtaaaaacaatgataaacacaactgttattactgatgccacagagcgccccagttaacagctccaaggcattcacctgcagcactgccggtactgggttttctgtttttttttcttctcttttctttgctgttaggtgcaacaatcgcagaaattccttcctcatcttggtcttgtagaagaggatgcaggagctgagagaggggaatgagcttgaccaagatctctgagtcaagctgtggtcaagctagaatcaagtctgggcccctcagccccctgcttgcggggagagaggggttgggagggacaagaacctctgatcccatgtgtcctcaaagcagtccaagggctctctgtttctttttgttccttttgtttctccttcttgagcagccaacgtgttccctaagtttgagaagcccagagagtgccagaatttgcttccaatgtttacctaccaaggacaaagccagattctggagcacctgggtggggctttttccatggagataaagactcccctgttgagtacaaatatttcctccatgaagatactcttgaaaacacactctccccactgagacttctcttcatgatatccgaaatgagtatttcccctgggggtttccccagctctgatccttacctctgtctctgtcctactaatcacctgggctgtgactgtctccgtctgtctctcaatctcaaattcctgaacaggacctcacacagggtctggtccacacaggagggtcagggagggtcaaggacctcctatcctacctaacttcaaagcattccaccagctatttctttttattccctaaatttttttttaagacagagtcttgttctgtcacccaggctggagtgcagtggcatgatctcagctcactgcaacctctgcctgctgggttcaagagattcccctgcctcaccctcctgagtagctgggattacaggcatgcgccaccatgcccagctaatttttgtattttcaatagagacagggtttcatcatgttgttcaggctggtctcaaactcctgacctgcggtgttttcattttgaaaactttcaggctgggcacggtgactcacgccagtaatcctagcactttgggaggtcaaggcgggtggatctattgaagtcaggagtttgaaaccaacctggacaacatggtgaaaccccatctctacttaaaaaaaaaaaatacaaaaattagcccggtgtagtggcagccacctgtagtcccagctactccggaggctgagacaggagaatcgcttgaacccaagaggcagaggttgcagtgagccgagattgcgccattgcactccagcctggatgacagagtaagactccgtctcaaaaaaaaagaaagaaaaatttcaaacctgcagaaaagctgcaaggatagtacagtaaacacaagtatccccttcactggattcacccactcttcacattttactgtatttgtttatacgcacacgacacatgcttttaaaatattcttaaattttaaaaacaaggagtagacattgtaactctcaccactaagtgcttcggcaaaaaccttcttaagattattcttaagggggctgggcacagtgactcacacctgtaatcccagcactttggaaggatcactttaagtcaggaattcaagaccagcctgaccaacatggtgaaaccccgtctctactaaaatataaaaattatctggacatgatgacacacaactgtaatcccagctacttgggaggctgaggcaggagaatcacttgaagctggtggtggaggttgcagcagtgagcctagatcacaccactgcactccaacctgggtgacagagccaggctccatcacaaaaaataaataaataaaatttttctaaaagtatagattattctttttttctctttccctcttttttttaggtgcagttttgctctctcacccaagctggagtgaagtgtcgtgatctctgctcactgcaacctccgccccctgggttcaagcaattctcctgtcccagcctcctgagtagctgggattacaggcgcctgccaccacgtccggctaatttttgtatttatagtagagacagggtttcaccatgttgaccaggctggtcctgagctcttgacctcaggtgatccacctgcctcggcctcccaaagtgctaggattacagatgtgagccaccacgcccagcctatatagattattcttaaggactttgtcctacgtaaccacagaccaggatcagacccgtgtagtttacacagatgcactgctgtctaataggaagcccatttccagttttcctctgttgtcccaatgacatctctcattgcgtttttgctttctgatcaggagaacatccggggtcaagcatgaactgcactgtgttgtctttatgaaagagaaacaaaaactcaggaccccaattcactgtgacagaaggaaaaaaaaaaactggaagctgagtcatgcaagaaactgcctttccttttgttcctaagcagacagctacagagaaacggctaagtatttccttaggtagctactccatgttcaccttatcttttttaaaaaaattttttaattattattttttttgagacagtgtcatactttgtctcccaggctggggtgcagtggcacaatcttcgctcactgcgacctctgtctcccgggctcaagtcattctgtcacctcagcctcccgagtagctgggactacaggcacccaccaccacacccagctaatttttgtgtttttgtagagatgggttttgccatgttgtccatgctggtctcaaattcctgggctgatgagatcctcccacctcagcctttcaaagtgctgggattacaggtgtgagccaccacgcccggccatattcaccttatctttctcaaggtgccaatttacccagcgtgagatgaatacgtgattgattattcccctacctcctgctttctcttacaccatgtggattcagtaatgcgaccacaccctccttctttcaccgccagccagcttttccaccctaaatattgaagccctcaaaattatctttggaaaaaggcacagaccacagactgtttctatgattgcatggtttttttctatgtccttaaccttggcaaaataagcttctaagttgatggagacctgtctcagataccttttggtttacatctcatctctggactcccctttaatctaggagtgctccccaactgcctttcattttctttaatgtcattgaaagcaatggttcactttttttttttttttgtaaagtcttccaccacctggatgtgcctgactcagactatgattagagtagttttaatgatttttggcaatattcttctagctgggtgtggtgtgtcacattcagaaggcctttaatgcctgtttgtcaaattcttggctaattaacaactgctgtgtgaggtaagccatggaggaggccgtgtgaatgtcctattccccaccacgagatccttctgtctccttgcacacattgtgcccaagctacttccagaaaatcctctgtgatcacggcaaatcacataatgtttttggtccagctcccctgctgccctcctatccactcttctgcccattacaggaagcctttacacccaggcagctcagcgtccagagctggttccactcatccccttcaaggagaggaaaactgagccctgggaaggagaagtaaagctggagtcacaaagccaggaaatggtggccaggggcacgacccaggccttataaacaacctgcactcttccccctgcaacacagcctgctgaggacgctcatcagtcatctcagtggttcacttccaatctcctcatctgccaagcacccagcatgttccagcaaagacaaattattcctatggcaaactgacctgcatgcagtttacaggactttatgttataaagaggagggatctatggcacttaatgaaaagttacacttaaagattttcataggcctggctgggtgtggtgtctcatgcctgtaatcccagcactttgggaggcagaggcgggtggatcacctgaggtcaggagtttgagaccagcctggccaacatggtgaaaccctgtctctactaaaaatacaaaacttagccgggcatgatggcatgtgcctgtaatcccagctactcggctggggcaggagaatggcttgaacccggggggcggaggttgcagtgagctgagattgtgccattgcactccagcctgggcgacagagtgagactccatctcaaaaataaaagaaaggatctttacaggccttcgtgtactgaccagaggagcaaaaatgaataaaaggattacaacatgaggctggcattgctgtgcacctatatccttgagtgctggtggccccatggattagatcaacaccttgaaagctaatttgacactagaccaacaaagtcctttgacctggagttccactttggcaaaaaataataataaataaataaataaaatccctaaagtgtataaagagaaaggaagttgtgatatttggaaattctgggctttgagtaaagagagtgatattctagacctgctatcatttcactattacctgaacaatttacttcctctttctagccttccatctcttcctgcaaaataaggcatggttttcaatcacttcaccacacaggaaaaggaaatagaaatagaaataaataaagtccactccaggagcagtggctcacgcctgccatcccaacactctgggaggccgaggcgggtggatcgctcgagctcaggagttccaggccagcctgggcaacatagagaaaccctgtccctaccaaaaatacaaaaaagtagccaggcatggtggtgtgcacctgtagtcccaggtacttgggaggctgaggtggaatgatctcttgagcctgggaagtggaatttgcagtgagccaaaattgcatcactgcacttcagcctggatgacagagcaagaccccctctcaaaaaagacaaagaaagaaagaaatagacaaagcccaatgctggcagtgctgtggaactaacatcttaggattggtgaagagagtggacatagcacttgtggaaagagccatatttcctgggggccataaggccacatatgccctgtgaagactgaccagggagtgttgggctgctacccacatttcatctatttgtcaggcaaaaatgctttaaagatcattccacttgattttcctttaaataaaaatcatgtgggaatggaatggaattgccgagtggcatggtgggtgtatgctgaaatttttagaagctgccagactgctttccatagtggttgtaccatcttacattcccaccagcagcgtgagcattccagtgcctccacatccttgccaacacttggcgtggtcactctttttaatcttagccattctaatagttctgtagtggtatcttattatggttttattctgcatgtttttcttgagacagagcctcattatgttgcccaggctggagtacagtgggcccatcatagctcactttctcttcaggaaagtcttccctgatctttcagtctaggtcagaagcccagtaatatacagtcatgaggccccatatttattctttttgtgctttttttgagacggatttttttttttttgcactccagactggagtgcaatggcacaatcttggctcactgcaagctccatcttccaggttcacgccatccttgtgcctcagcctcccaaatagctgggattacaggcatgagccaccatacccagctaatttttaaatttttggtagagacagggtattagcatgttgcccaggctggtctcgaactcttgacttcatcggtttcccaaagtgctgagattacaggcgtgagccacgatgcctggctcaaggttgactcttttttcttttttttttttttttgagatgaagtctcgctcttgtcccccatgctggagtgcaatggcacaatctcggctcactgcaacttctgcctcccaggttcaagtgattctcctgcctcagcctcccgagtagctgggattacaggcgactgccaccacgcctgggcaatttttgtattttttagtagagacggggtttcaccatattggccaggctggtctcaaactcctaaactcaagtgatctgcctgtctcggccttccaaagtgctggaattagaggtgtgagccaccacgcccggcctctttaatttcttaataggctcttccaggagttattgagaagaatattttacaattctaagtggaatattttagcaggaaggaccgtggtttatttctacgataattctgttgtggcttaaacagtttgttcttttgtaatttggggtattccctctaccacctattgttgactttcgacctttgatatttaccctatgtaaattcatcaacccctgattttacttcttcaaagccagcatgaggctagtcaagcctggtttcctctcacaggaagtcagtctttggccccatggtatttgtgtaaccaggttacaagatttaaaaatctatcgcaagtgacagtaattaaaaaaaaaaaaaaacaaatgtgggctactctggaagaagaaacattggaatgtagattttatttgtttaattgcagagacatgaaccagcttatactcgtttgatttccacattattcatggagagtctaaagtcaatttctgggaacaaaaaaccaacttgaaaagctgtttaaattctattagtgggacttccaaaggtacaagggttaagaaaaagagaggagaaaagagaaaagaggggtagggagaaaggaagacgtgacaggaatgtgagccagacaatggagatggagaaaaagcagtcaagagggacagagggcgcggtggaggtctgcaggatctgaagatccacctctcttctctggacactgacctcttacctgatcccagaaacagactgagctttaactctgaccacatactcctcagggtgatggagagtggggccacctgcaccctaccagccttccacagcccctctgcatgggctctgccccgcaccctacacgtgctctgaggcctcttattgcaacaaatgacttcctccggattccattccctccaccgcctctttcttctcgctcaagcatcttcaatggtctggatacgtttctttgcttccatttgtcgccttccactcactcatccatgtccacttccatcttcccctttctctaacattgcttgtactgagatcagcaacatcctgctttattgctaaacctgccaggaactcacaggttagttttgcatcctttgacgctgagggccacttcttttcctggaataatctctgtgaggcaaatatacatttttaaaaattttgtttagcctgttgcaaaaagatagagactctcctcttttcactcagatcattttctcttcattcattcattcattcattcattcattcattgatagagtctccctctgtcacccaggctggagtgcagtggtgccatccaagcttactgcagccttaacctcctgggctcaggtgatcctccctccttagcctcctgagtagctgggactacacgcatataccccactatgcccagcaaattgattattgttattgtgtgtgtggagataggatcttgctatgttgcctaggctggactttgagagcatttattttttagaagaggtgtaattgaaaattctttctctgtcccttgaagatgtatgtaaagctttctaaagcatacataagcatcttgcctgcctcacaacccagaactgtcctcctcaaggccataggagccctctctttgaaaggcaggcatccgggcagaaagcgcccctgtctcccagtttctgtgagaaggaaggaacctcagttctgggggcatctcactcccagttgcaaaactacctcctgtcatagataagagaggtttgtttttcctgtggataaagccaattaaccacacagagaatcaacacagttactgggtgaatttaggatgaactatgtgtgacaaatggtgccgttgagtcctctcaactgggaacgagtcaccgtgtatctggagaccatgtgtgtaacgggttgcacctgcttggctggatacaaaggtgggatttctttctgtctttgtcatctcttagcagattgtatcacattttggcttaatgcttactcagtcataagacaagtttcttttacttctatggatgtgaggggggtttctgggctgagcagaaatttgtttcttaatcatatttttccagcaacccccacccaacctaccccaccttctctgaagctacttcccccaggctttaaaggcggctgctccccggggttcctcccgggccctgcctctcctggttcatctgatctcccaccctcgaggcatcgtagcttccctcccttccatgtgctgatgcctctcggatctctaactctaggcagaaaccggcttctcagttcctcagctcaaatacccaccttgggacgggcatctgcaccaggacttcccgccgggaactctccaggtggaacacggtacatattctctggctgcagtgcagtttttaaatgccaccagtacacatggggaatgttctgtcttcccaaggaggaagccggaaagttcattttcccagcactctttgcaggagggacacagacacgggtccaggctttccccatcaggtgctcccgtgaaagactcaggatcccgaacagcaccaggaagcagagggtgcatggcaccgatttgctttttgtttttgttttaattttttgagtggggatcggggacagaagcttctggactccagggccagcctcagcagtgcagggtgcagggtgtggtttctgcctcctgcagtagccagaagatcttgaccggagctgtcctgtgcctgtggtttggtccttgccctgggccctgtggcctccaagctggcttcatgagggcccttggagcttggtgaccttcctaccctgtcctttaaccagtcccttttctgcttcttgctggagtgagctgggcggttttctctgaatctgttcctgtgctgggttctcccttagggaagggcaccctgggcacccgacccctcagccggatgcctagcagatgttctcatgcttccacttccttgcccctttatgtccagtggtcactcctttatgtcccttccatgtcctacatctctctctgctgtgtcctgtcttctgcaccctgtggcctccacctaagtttgcaccaccacccattcctccttgaatgaatacagttgtctccccgggtctccctgtctccactggggccagcagcatccgagccagcttcttctctgtggcagagatgatctttttcaggcctcctccggccatggccctctcctgcttctgtttccagagctcccaagtccctgggatgtgctccagctgctaagagaggcctcgaaggttgggtgatgtggcctccactgtcctcctgagcaaccaccccacctaccctcatccttcagctccattacatttcctttttctgtttaattttttgaataggtgttgtatttagatggctcagaaatttgcatccgtgtgtatctgtgtatgtgtgcaggcatgaagagcctgtgtctcatccctgttccctatgcacccaggtcctagccccacgccagacccagtagccagctgtgctgttcatgacctgcaaagctttctacagctgttttatgcaaaacaataggaattattgtaaattatggtaaaatatatataacatagaattcaccattttaatgacttttttcttttcttctcttttcttttctttttttttctttttttttttttttttttttttttgagaagagttctcactctctcacccatgctggaatgcaatggcgtgatctcggctcactgcaaccttcacctcccgggttcaaccgattctcctgcctcagcctcctgagtagctgagactacaggtgcatgccaccacgcccggctaattttttgtagttttagcagagaggggatttcatcatgttagccaggattgtctcgatctcctgacctcgtgatctgcctgcctcgacctcccaaagtgctgggattagacgtaagccacctcgcccggcccattttaaccacttttaagtgtacatccagtggcaggagtacatttaggttgttgttcaacgaccaccactgtccatccccacccagaactttttcatattccccaactggaattctttaccaattaaacacaactcctctttccgcctccctccagccactgacaaccaccttttcattttctgtctatgcatttcacgacgttaggcacctctgttaagtggaatcatgcaaatttgtctttttgagtctgattatttcacttagcagaaagagctcaaggctcattcatgttgaagcaccatcagaaccacccttcttgttatggctgaatcccattcatttgtacatatagaccacgttttgcttattcattcacggatggatggacactgggcttgtttccaacttctagctattgtgaataatgctgctatgaacaaagacatgcaaatatctgctggggcccctgctttccgttcttttcggaatataccagaagccgaattgctgcatcttttggtgagtctatgattaattttttgagaaacgaccacagtggttgtgccatattacatacccacaaatgctacacaagcgttccaattcctccttgccaacacttgttcttttctgtttttcttttttttttttttttttttttttgagaacaaccatcgtaatggatgtaaggtggtatctcactgtagttgtgatttttattttcctaatgattagtgatgttgagcatcttttcatgtgcttattggccatttgtaaattaattttacatttcctcctttgtaatgtaagaggtagcacatggtgcattgttctgcttcttgtttttctcactatacggtgtatcttggaaaccttcccgggtgcacagacagaaggatacctcattctttgccacagctgcccagtatccatgatgtggatcatggctcatgacccagttctctatggataaacatcagggtcgttcccggtctgtggccatcgccaacactgccgtgactagtctagaatgggtgccatttcatgcatttgcaattcccagaagtacactggttagtcagcaggtgagtgcattggtgagaggatgtgactgcagtctcaggaaatatggaaaccttcttccctttctagctgcagcacccccagtctggacagcatatggaaagcactgaggggaagccccactaagcacagaaccctgctggccacccaagacctcaatacagatggacaacatgaagcccctggcttaggggaaaacagagagactgagaaacacacagagagagttggggcagggatggagagagagagaaaatgataaagacccagagagagacagagtcagagaaatacaggggtggagaggggagatacagagagagacagagagcaaaggggacagagacattaacacagagagaaggagggagaggagaggcatggagagagggagaactcaaagagccagagccagagaagtagaaggtgagccatagagagattcagggcaggactagggtgagacaagagaggacccaggcttgtggattcttgattaaaaatcaatggtgttataatccagaaaagagagagtgaggggagagagaaagggcctaggactaaaaattaaggggtcacttgcgcaaccccggatttgggtgtctccttagattttgcagcagagacacctcacttacctcaccctcatccttgtcctgagacccccacagggacacagagacacaaggaaaacacatagaaccaaaagagcacccaagaggaggaggagggacatggagacaccacgatagtcaagctgatggggccacacaaaatcagaacagagacaaagagggaggcacagagagacacagagggaaagagacccagaaaaagagatggacagagctggagagatacagagtgagagacagacagtgtgcaggaggaaggacactcataaatacacagaaacagaaagaagaggctggagtggtggctcacacctgtaatcccagcattttgggaggctgagacgggtggatcatttgagattaggagtttgagaccagcctggccaacatggtgaaaccctgtctctactaaaaatacaaaaattagccggatgtggtggcacacacctgtaatcccagttactcaggaggctgaggcaggagagtcacttgaacccaggaggcagaggttgcagtgagccaagattgtgccactgcactccagcctgggtgacagagtgagactctggaaagaaaagaaagaaagaagggaaggaaggaaggaaggaaggaaggaaggaaagaaagaaggaaagacagaaggtacccattggtagagagacaaagacagagacagacagggagacacagagatgaaaagacacaaagtgagccacagacacacagtgaggaggagacagagccagaaacagagacccagtgtgatggaaagagagagaggcagacagacaagagcagcatcttcagggcgacccaatgcccagtgcccctgagctgctccacggggagggggctgagcgcacagcctgcatcccatccatcgtttcctggccttcgtgactgggtgtccatgcacaatccagtccctgtctctgaacctcagtttccacactgtaaaccaggcatagatacaccacctcaagggtggtggagagggctgggctggctgtttctgcttaatgcaccctcatgtttcataaaggaccccatgaactgtgatgagagtcactgttcattatcatgatggcttccagtacttacagcagtcagcactaatatcatgcacatcatcagcacttggcatgaatccccattcattacagatcagcattaattgagttgatgctctgtgcccgatacttgtacactcataacatggattgttaatttaattgagacaaccacagtctgaggtcagtgatatcacgatcatctccactttccagagaggaagctctgctggtaaggtgcggagcaggggttcaaacccaggtggtctggctccagggccaggtgtgcccaggagcagggctcttcctgggtgtccaaggccaccttgtctccaggagtgtaaccgtgtttccagccactgaaaacttggattaaagcccaaagtaaactttcccttttctggctttgaggtgtggtgtttaaattcagagacattctccaggaaagcagaaacttcttggctaaaatccaaacctagggaatttattgcagagatggggacgtggttctcatttctgcccatctcagagtacagattaattaactcagaagattcaaaagattatattttccatattccttgctgaacataatattatacccttttctctccagttttatgcttctttttttcttggtgctaaagaaattgtaaacctttgtcttaaaactggagtcccttccaactgctggtgacagaaatcccagcaagataagaaggagcaaatgtccccgcttcccagacaacttgagatgtaagcagatcctattcagcatcctacaatgttcttgcaaagattatttctgtcagtggagctctgtaaaacacccagactccagagaccatcacttggtcctgtgaaggtaccctcttagccttcaaatatctgaaattcagatgaattgcctgacttacttttttttttttttttgcaacagagtctcactctgtcgcccaggctggagtacaatggcgtaatcttggctcactgcaacctctgcctcccaggttcaagcgattctcctgcctcggcctctggagtagctgggactacaagcacgtgccaccacacccagccaattttttgtatttttagtagagacggggtttcaccgtgttagccaggatggtctggatctcttgacctcgtgatccgcctgcctcgacctcccaaagtgctgggattacaggcgtgagccactgcacccggccttacttacatttattaattcaatgcccaggacataatgtgtaaatggacaactctgttgtctagaatttatgcaaatacttgtgatgtttgtttgtttatctggaaaatggcttttcagggaggaaaagcttttcctctacccacttaggttcagtatctggggtcttgtgaattttactaacaaaagatcaattttaaaaaggcacacaattttcattaatatttacatgcatgggagttcacagaaaagaagtgaaactcaaagaaatggttagacttgtggggcttgtataccattttaacaaaggaaaggggtttgttcttcaagggaaggtccatcatggggaagtgacctagaaatgcctgggaaactgatggagatgcagggtcttttagtgaggtctgtctatgcacactcatctcagtctccaggatgagctgcctttctttatcatctgggtagaaaacaccttcagaaaaggaaatttatgctctctgcttttaggtagataaggggagggcagacctcttcccgtatctgttgattctcaaaggccttaagctcaaaataatccttatacaaatgtggcgaattttggggtgacttaacttgatccctttcaggccactgatgagtccatctttccccacccaggtggaggtaagaaaaacctgtgatgtggctgcatggatttcttatttaaatttagagtgtcactaacaaccatttatcaattcattgggcactccctgagcccctgctctgtgccaagccctatgctgaatgatactgagaccccaaaatgaatgagacccatccatgctctcaaggacctcccattcccaggaacggcacagacaggacagggtgctcagacccataagagggtgtggtgactctgaactcaggtaggctgaacgacgcctctcagaactcccttccctgtaggttcctgttaggttgggagcaggacacacctgcccaaagcagctgccgttgtgcatttcatgctggggaaatccaggcaggagcctccgtggctcaggtccaggtgttgctcatctgctagctcagctggtcagcctggagcagcagcaggacctgaaactgctccacctttacgccaatcctccttcagcttctccacctcctgagccaggtgtgcattgagctctgtgacaaagttcactcctgcaggtcccctgcaccaccaagatgaggcagcaagaacagaggtaggttctgtgggtcccgaaaccttccaccttgtgtaaactcccggcctgcccttactccccactttccatccatctccccttccccagggcctgccctgcagacttggagctcaggtcagatgcagagcccacagcctcacaggcttccatcagccagaaatgggatcctgacagattccaccagcaccaagtggagagatatttaggtatttaggggtctgagtgaggggcaaactggcctgcctggggcggcagggaaggtttcctagaggaattcctgctattcctcattgcgcttccaaattttagtcgtgttccacttttacgatctgaatagcccttgcactattatttactcaaaaattttccttaaaacaactcactgtttttctgtagcctcatcttaaaacaataatgtttatctaatcatgggattaatatgatatttccaattcttttactctaataggcgcttaatcacaagcatagcctgtaacgctttttaacaactgtcatgtgtaaccccttagaatcatctcacatgccttccaccactgacacctgaaccctattttgggaaccactcctttaggtgcatcctgaaggaggaacagaggtttacatggaaccaaatggaggaagggagttttgtgctgagagagcaggttaaggagtttcctagaagatgtgacagaagctgcattagttatccattgttgtctagcaaattaccgcacggcttcggggcttaaaacagcaacagatatttgttacctctcaaattctgtggggcaggaattgaagagtgttttcagcattttttttttttttttttttttttttttgagacggagtctcgctctgtcgcccaggctggagtgcagtggcatgatctccactcactgcacgttccgccttccgggttcagggcattctcctgcctcagcctcctgagtagctgggactacaggcacccgccaccacacccggctaattgtttgtatttttagtagagacggggtttcaccatgttagccaggatggtctcagtctcctgacctcgtgatccacccatctcagcctcccaaagtgctgggattacaggcatgagccaccgcacccagcctgttttcagctttttattatgaagctgggtgattgtgacttggtgagtctcatgaggttggagtgaagacgctagccaggtgcagtcatctgcagctttactgggcctgaagggtctgctttctagaaaggtcactcacatggctgacaatgtggtgctggctagttcctacctcagggcctttgcacttgctgtcctgtgcctggggtgtctttcatctactctttgtataactggacccatcccatccttgatgtctttgcaccaatgccaccatccatgacctctgatgccaccaagttactttcttacacatcatcctttgttttcaactttttaatatgaaagatttcaaacatccagaaaaattgaaaacataataccaagaatacccacatcctctccttatattcaagtttaacattttgccatatttcctctggtttttttctgaaccatgtcagggtaaattgcagacatcaagacactgtgtccttgagtactttagcatgcctctccccagaatgactagcccacaataccgtgatcacgcctgagaaaatcaacaataactccctaacagtatctaatacatagtccattttcaatcttcaccattgttctgcaaaatatcttttccatgtatatatatttttatatatttatattatataaatataaatatataaaaatatatattttatataaatatataatatatataaatatataatatataaaaatatatattatatataaatatataatatataaaaatatatattatatataaatatataatatataaaaatatatattatatataaatatataatatataaaaatatatattatatataaatatataatatataaaaatatatattatatataaatatataatatataaaaatatatattatatataaatatataatatataaaaatatatattatatataaatatataatatataaaaatatatattatatataaatatataatatataaaaatatatattatatataaatatataatatataaaaatatatattatatataaatatataatatataaatatgtataacatataatatataaaatatataatatatataatatatataaaaatatatatttatatatacttttttttgagacagagtctcgctctgttgccaggctggagtgcagtggcgccatcttcgctcactgcaacctccacctcctggattcaagtgattctcctacctcagcatcctgagtagctgagactacaggcatgcaccaccacgcccagctaatttttgtatttttagtagagacagggtttcaccatgttggccaggatggtctcgatctctcgacctcatgatctacctaaatgctgggattataggcgtgagccatcatgcccagccccatgtatatttttaaacggggatacaatcaagactaatgctttgtatttggttattaagtatctttcattctacaacagtccccctccactacccatttttttcatgactgctaaagaaaagacagaaggcccaaagtggagtcaacttatgctaaagttgcacatcatcaaactgaaacctgcgttgtttactagtaagatacgtccttccagaaatcatgagagagattatagccaaatcccattaagccaacaagattttgctaaaatccctataaagggaagtaactttgagatgacagattggctattttttccttgttcctgctttctttggcttttttctgcccataaaactcaccaaatccctttagctcaatagcgctccattctgttttatagattgaatgccgcctagttcatgaattgctaataaaagccaattcgatattttactctatttgctgaaattttgttctttgacatgacatagactgtgaggagagcagacatgttgtcttatagaatgcccacattctgaatttgtttccttatggtgtcatttcactgacttcactctaagccctctattctctataaatctcaaagtgaatcccaaagcttgagtaaattctggttgcattttttttaggcaagaatacttcatgagtgatgctatctacattatattggattatatcaagttgcaatagttatatagctattattcctgtgtgatatttcagtgacttaaagattgatccatgggttcaggtgttgtcagcctgattcgtgtgttgtcaagttgcccatcaactttttgcttgatggttttagaatgatctaggcaatgatgatgatcattgcctagatcagtcatttcattaagcattccaaaatggcaattatctaatttttaaattcctcctgcatttttaaaagctagacttatttttctctaatgaagaaaacttcctcactcgtgatttggttaccttgaagtgttgtctgtttaggaagttactgtgatacttgattattttccttcatatactagctttgtgagctagttccctagcaacctccaaagtaaactgatgacattttaaaagtattattatgaaatatagatttttgtatattttaagtgtttcaatccattgcatccacactttcttttgatgctcgaaatgtcccacctttgtttgaaacagcccctccaagttggctcctatgtcctatttttttttttttttttttttaaagacgaagtttcactcttgtcagccaggctggagtgctggagtgcaatggtatgatctcaggtcacacaacctccacctcccaggttcaagcaattctcctgcctcagcctcctgagtagctgggattacaggtacaagccaccatacccagcaaatttttgcatttttagtaaagacagggtttcaccatgttggccaggctggtctcgaactcctgacctcaggtgatctacccgcctcagcctcccaaagtgctgggattacaggcgtgagccaccaagcccggcctcctatgtcctcttgacatgacccttgtagtatatgataatttcctgctttggcatggaaaatatcccaggctcatcttacataattcttacttcatatctgaaatcaggcatgtctccaaggagtcttggagaagattcatttttgtggggagtggtatttttagagactacaatttaaatactaagggtgctgtttgctactgttagcagatacagctagaaaaagacatactttttagaaaaagaaatgcttttcctgagttcacactagtatttcccatgcaaatgaaagattcttgggttttcgtttaaatgcattggtttcatatttgtatctcttttctctggccctgatgcataattacttatttgctatttgtttcaaaatagtcatgcagctgtttgcactaagaataacagtactgaatgcagtttagatttctttcatttatttcaatcagcaagatctatctcactagagttgtccagtcattgtacacaggtaaagtagctggaaataattttcctctgtgttactatgccaccagctttccacccagattcatttccaccagtttagttttcacttttagagatggcttagctcttgtgttttaaattttattttgtttttaataaggtaaaatatttacctggttacacaatcaaactattaagcaaaaggcttaatggtttatgttccatctcaggcccctttttttccctccctcctcctataggtgaatcagtttggttttgttgtttattcttccactgcttctttcaaaaagcataggcaaatatgtttttttaaatattttaaaagtttatttgtcttttaactagcccacagacccaattctttgagggctgagctgatttctgacacatgttctataggccctcctcttggaaacttactttctatccccttccaaaaaagtctgcaccttccatcatgatgcacattttaagttaaaattgccaatccaagcctcaaaatgcaagtttattgaataaagctgagaagagcagtaaacagacaaaaaaatgcatccacctaaataaaaaaattcacatatttacataattcagtaactgttaaaagttttcacacacagaggttaatgcacaggaaaatgctggtaatagcatctaggtgtcttgaaacgctgaaagcaatgtatagacacacaaacacattaaggtttaggtataggtcaattaacaaacctatacagtcctcacagagtcacacactctagttccaattcctccttttaggcacaagcaagttgtcacattctttgtaatggttcactttgaccattaatggtattgaacaacagcagcaagtttaaataccctttcatttacagaaccatccatcccatcagggaaatatgcaacatgcttcaaagaataagaagagaactttgggccaggtgcgtggctgagggccgggagtggtggcttgcgcctataatcccagaattttgggaggccaaggcaggcagatctgaggttgggagttcgagaccaacctgaccaacatggagaaactctgtctctactaaaaatacaaaatcagccgggtgtggtagcaaatgcctgtaatcccagctactcaggaggctgaggcaggagaatagcttgaacccgggaggcggtaagctggagattgtgccattgcactccagcctgggcaacaacagcaaaactctgtctcaaaaaaaaaaaagagaaaacttaaaagcccagattctactcataaaaatacgaatggagaaaagcaagtagtgtctgtgcaacacagtgcagtatattgtacagaatatttttaaggccacggcagtctatgaattaaaactggtattcattaaaagaacttactgtagactaaactctgagtgctcaacacgtttggaaatgcagtctacataagtgctgcttaacaaaagaaaaaatcacacgcagtgtgaggcaacacataagcgggtgtcccatagtgtttaagctactacagtggtctatatgaataataatttacaactgaaccagtatgaatatgtccctttatgtatacagaagtcactaaactacaaaacatgttcatttgaagtttttagacatctctgtatcatagaagcaaacgaacagcatcagttcctcagttctctgtgtgattgattattaacctgtagatgttgaacatgattacattagattaagcaggcaggtctagagttgtcacaataatcaagatgtctaatggcaccagtcaaaagagtgccaaaccttacatcaataaaagagaaaaataaaattttgtatttgtttataagtatcttttgtgctgaaagtcaactttatggctggatgtaaaaagtcgggaattacagtgtcatgcagcagcactggtttaatgactggagatagaacaaacagatgtttgaactaaatctgacttttttttttttttgagatggagtctcactctgtcgcccaggctggactacagtggcacaatctcggttcactgcaagctccgcctcctgggttcacgccattctcctgcctcagcctcctgagtagctgggactacaggcgcccgccaccacagccggctaatttttttgtattttttagtagagacggggtttcaccgtgttagccaggatggtctcgatctcctgacctcgtgatccgcctgccttggcctcccaaagtgctgggattacaggtatgagccaccgcgtccagcctaaatctgacattcttaacagtttttattatattgggtggaatgctctaaattcatgaaagcttttgagaaaatcttcaattcttaaccccttaaaaaagtatgctgaaccagaaagaaaaaacaaaagatagaaataatgatctggacagatgcaaaacagcatgcgttagttcctcccatatcccaactgccatctggcgataaagagttctcagaaagcagaatgtctttaatatccctcaggtaggatctcaccagtgtaaagaatcaacattgatctggtgcctccactcactctctgtggaccgtattggattcctaagatgtaattatacatttcacatgcatttgtgagataagataaacattatgtttacatatatcccacctgagtcattcaggcttaaaggttttctaaatactgtgtgcggcactagaaacttcatgctgtatcagtgaattatcacaaggacagaaaaccaaacaccacatgttctcactcataggtgggaattgaacaatgagaacacttggacaccggggcctgtcttggagttgggggctgggggagggatagcattaggagaaatacctaatgtaaatgacaagctcatgggtgcagcaaaccagcatggcacatgtatacctatgtatcaaacctgcacgttgtgcacatgtaccctagaacttaaagtataataataatttaaaaaaggaaataccaatattattagcctttaaccctaattcagaataaactaaatgttctaattgattttaaaaaaaaaaaggaaaaagaaaaagaaacttcatgctgtatcaagtcaatgtcagtattaagctactggactctatgaaatattatagatagacatttactgaaaaccaatataaaaatctggcccacaaagaccagaatggaaatatccaattttcttgatttaagatggtcaaaaccatcctggctaacacaatgaaaccctgtctctactaaaaatgcaaaaaattagccgggcatggtggcgggcacctgtagtcccagctactcgggaggctgaggcaggagaatggcatgaagccaggaggtggagcgtgcagtgagccaagatcacgccactgcactccagcctgggcaacagagtgagactctggctcaaaaaaaaaaagatggtcaaaagtgtgtgggtttttttttttttttttggaaaaaaaaaaagctctacacatgatttaagacaggtatgtgtaagaagcctttttgtgtgtgctggctttatcacgacaactctggctgattctttatgaaggattagggatactcatcttcagcagtgcacgtgagaagtaaactctgaaaaaggcaatttcttgggtttaggaaggactgtattctgggaattacttcagaggaatgggcaataattctaggattatacccaagaaggactggaagccttcaggagatgcttcagcttcttctagattttgaatgctcaataagccactgaaatgtgatatctatattatattacatatgtttatgtattagcatttcacccctctttggaaagggatagcattttaatatataatatactacaatttgtttgttatcttccaaccttttattttgaaagttttcaagcccatagaaaaggtggaagaattgtacaatgaaccccttatatatttcaccaagattcaccaattgttaacattttgccacatttgcttgattgattttttaatttttttctatcaatctagatacatgtgtatgtatgtgtgtgcgtgtatcctaattatttgcctgtgtatacacagaaagaaagaatgaaaaatatacataataataaattatatatatgttaggtgaatatataaatatatatatacttaagttgtgtgcactttactctgttttttatgtcataatttaaaattttaaaatatataagaaataaataagcctgaaacaaaggtattttcagcaaaataaaaatagagacacttcatcaacagctgattcccactgagacatatatttcagaaaggagagaactgatcacagatagaaggtatgggacgcaaaaagtaatgaagagaaaagaaagtggcaaatacacgttaaaatgtaaatgtacttggtataaatagtgctaatgatatctagtgggattatacaaagatacactaaaaattccctgcaaggttagttagtatgtaattcagggtgagtaggcaaattggtgaagctaagtaaatctaaggtcattttattattcaggaaaaaggcaaaggtttaaattgactttagactttgataaatgaattatgcgtgctggaatttctagcctatttcccaaacaaagattatcagagtggattaggaaggcaagatctggcctggtgtggtggctcacacctgtaatcccagcactttggggggccgaggtgggtggatcacctgaggtcaggagttgtctaccagcctggccaacatagtgaatataatgaaaccccatctctactaaaaatacaaaaattagcctggcgaggtggcacatctctgtaatcccaggtacttgggagcctgaggcaggcttgaacctgggaggcagaagttgcagtgagccaagaccatgacaagaacaaaactctgtctcaaaaaaaaaaaaaaaaaaaaaaaaaagaggcaaagacaaagacaagatccaataataaattatttatttaaaaacacatctaaaatggaaggaggttgggtgcggtgactcacgcctgtaatcccagcattttgggaggccaaggcaggtggatcactggaagtcaggagtttgagaccagcctgaccaacatggtgaaaccccgtctctagaaaaattagctgggcgtggtggcatgtgctgtaatcccagctattcgggagactgaggcaggagaactgcttgaacccaggaggcggaggttgcagtgagctgagatcgtgccagtgcaatccagcctgggggacccagcaagactccatctcaaaaaaatacgataaaataaaatggaaggatacacaattgttgactataaaaggatgggaaaagatatttcatgtaataagaaagccagcatataagaggcaggaggatcacttgaggccaggagtttgagaccagcccggacaacataaggagaccctgtctctacaaaaaaaaaaaaaaaaaaaagccagatgcctggctcacgcctgtaatcctagcactttgggaggcaccttgggactgttgaattaaaacaaaacacagcttaggctgctgtgggtattgacgacttgtgatttctgtgcagggcactgaatgtcaaagtgaaggaattcaatgaagcccggatcaagggcaggagcaaccgtgaccctcttaaaagagccaatgccccatgtaattagtgacgcgcgcgaatggatagacgctattcccaccgtccctacatagcatccagcgacaccacagccaagggacaggcttggcggaacctgcgggagagaagaaccctctgagcctgattgaaaggcggtgaagagacaggagagggggatcggtgggcggtcccgcctccatcttcagttcccgcatgggggcgaggcaggtacatgggccttgcgggctgtgggtgaaattccattattaattgttttttcactaacctggtgggggagtcgggcgcgagtttcgagagagactctggcttctggcgccaagccttagccaagctcaccaggggcagcgctagatggggagactgggacacacgtctgaacgcagatgtccgaagggagcgcaggaagacagaagcctcccgttgggcaggagggcaaaagctcctgggtcttggatttgcaacaggagttcagacggtgaaagcagggcctcaggatccttctgaccttttgagttttaaacaaggggtgtcagaaaagtcgtcacagggataactgatttgcagcaggaaagcattcataggaatgaggcttctttttgttttttgtctttgttttttgtttttttttttttttttgacagggtctcattctgtggcacaggctggagtgcagtggtgccaccattgctcactgcgctatgtgagctatgtgatcggcgcttaagtgatactctcgcctcagcctccaaaataaatgggaccgcaggcctgagccaccatgtcctgtggctttttaatccttttgatccttggatgtgggctcttcctatcattggaagacagaattcaccaaggttgggatgttcacccactcagaaaacctgagctggggctggggctgtggctcacgcctataatcccagcactttggtaggccaaggcgggcgaatcacctgaggttggaagttcgaggccagcctggccaacatggtgaaacccccatctctactgaaaatacaaaaattagccgggcgtggtggcgcatgcctgtaatcccagctactcgggaggctgaggcaggagaatcacttgaaccagggaggcagaggttgcagtgagctgagacggtgtcactgcactccagcctgggcaacaagagcgaaacttcgtcaaaaaaaaaaaaaaggaagaaagaagaaaaggaaagaaaagaaagccggagctgggattagaccatgtgagacaggttgatttcacgctagtgagcatgcgtggttgccatggtgctcttgcccagtaccacaggtccccaggttcagacgtttggtgcctgtgcttggatgagggaccactgggctaagctgccatccgtgggatgctgactaaaggcctccaagtcagaatatgcccaggcagaactatagggcagcgccatgaagcctcggctggcctgggatagccggtcgtcgccaacaggacgcagtgcagcagggttgaggccccatgcggagagctcattgtcttgggaaaccggcagtgggaagggtggccggcccctcgcccttcacgcaaggcccattcgtggggaacctggcgctaaaccatccctagaggagctgcttctgggtccgagttttctctgcagcagagtggctccctggatgggatctgttgaaagttagccctccacacaggcgtgtgtccgcttcgcagcgtgtgtgcagagccatcaatccttccttcctcaatcccgggggtctcccgcgtccccatacccccaccccggcctctggtatgggaaccagtgacgtctctcccgtgagcctgcccgagcccgcaatgccctcaggaggcgcccgccccgccctctgggctttccgagggctgcaaggaacatgcgcttccgggggtggagaggcggtgagggccgcccccgcagcgtcctgtttgggagccaggtcttctcctcgttctgcccgggctcgaccaggggctagatcggggttcggggagcgaacaaggcacgtcggagggtggcccggtggcccctattcgaggggtggctgtgggccaggaggtagcggtggcggcggcctcgcctgtggccatctgagccgtgggccggtaggcggggaggagaagagggtccggccggtcaccgcccttgcacgcctcctcctcttaaaaataaataaataaataaatggcgagttgggggtggacagggatgttttagtgctgtgcgtgcgttctggagccacaccaccctctagaaccagggccacaaccacccgtgacgcccaccgtgagaagtgccctctcccagaagggcctgcaccagagaccttggtctttgttctttttggagagatctgtgcagatcgaggtcactccagccctggattcagggagggctgcactatcagagaaagacagcttcagcgaggcctcacagtgagtcagaccagactcttcccatccccaagatccctggactatggggcatcatcctgggatccctaaggtcacatgggaaacttctcaagcaccgatgctgccatctgatactgtggcctgatcccacccctggacacctggaaattctcatgaacccgtggaggcctggtgctacctgaaactgtgacctcattctacttccaactcacaagttgaagcgtagatttacatgcagtcaaatcaataattagattaattggctgactaaaggaaaaacttcagacacgttaaatttaacacagtttaattgagtaatgaatgatgcattaatcaggtagcccccagacccagagtaggttcagagaaacttcagggtgttccgtccataaatggttggataacatctaccgcagaagaaagtgatgtagaagaaactaaggaaggcactgaaatagctggactgctaacagttgggtgcttgccttatttgaaccaggtttgaacagttagttgggtacctgtgattggctgagactcagctatttttactatagcaggttacagactgtttacacatcaagttaggttacagttcactatgtatggagaaaccattagaccaaacttaaagtagtagggaggcagctttagacctaacaatgttaacaggccaaacatttcaattaaggggtacagattggtcaaattgcataaaaaagcaatacccatatatactgtctacaagggaaatattttacatatagggaaaagcattattgaaagtgtgagtattgaaaaagatataccatgcaaacagtaagcacaagaaagttgaagtactagtaaaaaaaaaaaaagaaagaaagaaaatagaattcaaaacagaaggtaaaagagactgaagcaggagaattgcttgaacctgggaggcgaaggttgcagtgagccaagattgcaccattgcactccagctctgggtgacagagcaagactccatctctgtggaaaaaaaagaaaaggagaaacaaatgtgagtgtaagcaaggcgagtgtttcctctatgattagtaattagcagtcttcaaaaagacattctgtggcttggggtttaatagtaaaataattagctggcatggtgacatgttcctgtactcccacccaagaggctgaagtgggaggattgtttgagcccaggagtttgaggctgcagtgagctgtgattgcaccactgtactccagcctggacaagattgagagagatcctgtctcaaaaaaaaaataagtaaaactggtggtttaacctcaaggcttacaactcattgttttgtaaggtttgcagaagatctcaatcctttacaagtaggaaggaaaagcctgttggtttgagagggaactgggtgtgtgcataggcctgttggtaggagaactggagcactcaaaaagggagctgcacgatgcttatgccggcttcactgagggctgtgggcattggaggaatgggctttgaaggacaattaggagtttgtggggtaaacaaatgcatgggggaagcggattagggagaggtctcccatgcagagggaccagtgtgagcaaagccaaagaggctggaagagactagggatgtcctgggaatagatattagacagggaatgataagggtgaggcatgggggctggtctccaagaccagtgtgggaggttggaattttcccccaggaatacaggaagcatggaaaaaattctgaggatggaatacggagggcctgaggtatgtggtggctcactgttgtgtgtttctcatttctggatctaagagacattctttaatccagcaaatgtttacttacctacactgtaatcatatgctgagtacacagagatggatcagacacagctggaaggaaccagatacacacatgcccatgcacacatgcacactgacatgtacaccgagacacacacatcagacacacattcacacacagcacacagatacacacagacatacatatatacagacatgtgcacacacaaacatgcatgcactcacagtcacacatgaacacacatagccaattatactataaagtacaaaaaaaaaatttttttttgagacagggtcttgctctgtcaccagagcaaaagctggagtacagtggcgttatctcggctcactgcaactgcaacctccacctcctgggctccagcgatcctcccacctcagcctcccaaagtgttgggattacaggcatgagccatggcacccagcctagaatcttacttgaggtaaaatgagaatccactggaaggttttggtttttttgaaacagagtcttgctctgtcacccaggctgcagtgcagtagcacaatcttgactcactgcagcctccacctcccaggttcaaatgattctctcgctgcagcatccagagtagctgggattacaggggcgcaccaccacgcccagctaattttttcatttttagtggagacagggtttcaccatgttggccaggctggtctcgaactcctgatctcaggtgatccaccacctcggcctcccaaagtgctgggattacaggcctgagccaccgtgcctggcccattagaaagttttaaacaggagtaatgtggtgtggcttgcaattaagagatcgctctggtgccaggtgggaaatagccacatgggcaagggcagggcgtactgcaataatccagtgaccaatggtggtgtcacaagtgcttatataaaaagatgccttcactgtatattagccattgagcttttttcttttttacaaacgttccatggattcataaactatttgccaaccattgctctagactaacctcctcattttcttttttttcttttttttctttttttttgagaccaagaccaagttttgctcttgttgcccaggctggagtgcaatggtgcagtctcagctcactgcaacctccgcctcccaggttcaagtgattctcctgcctcagcctcccaagtagctgggattacaggcgcgtgccaccaggcctggctaatttttgtatttttagcagagacagggtttcaccgtgttggtgaaggtcaggctggtctcaaactcctgacctcaggtgaaccacccaccttggcctcccaaagtgctgggattatgggcttgagccactgcacccagcctaacctcttcattttctagatgaggacactgaagcttggagaggaacagaaattggctcaggctaaggaagatctgtcaatctctcttgcaccaaaaaggcaaagccacctttctcaaggggctgtgtattggggtgttcttgcactgctataaagaaatacctgagactagaagtaatttataagaaaagaggtttgattggctcaaggttctgcagctgtacaggaagcgtggtgccagcatctccttctggggaggcctcagagagcttttacttatggcaaaaggatgcaggccagagaaggggagcgagagagagtaagaaggggaggtgccacacacttaaacaaccagatctggcaaggactcactcatcattgcaaggacagcaccaagtcatgaaggatctgcccccataacccaaacaccttccaccaggtcgcatctccaacactgggaattacatttcaacatgagatttgggcgggggacaaatatccaaactatgtcacggagcaagaggaggtccctggagctgttgaagcagaaatggggtgaagaatagaggtggagggtgcttaggcttccaaggtctcttctaggtgtgagatggagggattctgcgaccaagtcacctggagagtgactcaacaaggtgactgctttcccaagcacgagccctcgggggacagacgggggctgaaaactggcacacattcttcctggatcctttgacatgtgatcattcaaagataacagttcaaagataacaaagggattgaagctttaccaatccctttcttattgtggcattttctctattaaaaataaatactcatttatactataacttacagaatcagtaccaattctgaaagtatacaaagcgttgccttactttaaggaaggagaccactactactcctgctgccctcctcccccgaccttgcctagttcacaagacaggaggaaagagagaaagcaaaaagttggaaagaaacagaagtaagataaatagccagtcaaccttggcaccaccacccagccctaggagttaaaaaaagtaataataataacagcaacccctgacctaaactacttgtgttatctgtaagttccagacattatatgaaaaagcattgcaaaactttctgttctgttacctgatgcatgtagcccccagtcacgtttcccacgcttgctcgatttatcacgaccctttcatgtggacccctcgaagttgtaagcctttaaaaaggccaagaattggccaggcgtggtggctcatgcctgtaatcccagcactttggggggcgggcggatcacgaggtcaggagatcgagaccatcctggctaacacagtgaaaccccatctctactaaaaatacaaaaaaattagccgggtgtggtggtgggtgactgtagtcccagctactcgggaggcggaggcaggagaatggcatgaagtcgggaggcagagcttgcagtgagccgagattgcaccactgcactccagcctgggcaacagagggagactccaaaaaaaaaaaaaaaggccaagaatttatttttcagggagctcggctcttaagacgcaagtctgctgaggctcccggccaaataaacctcttccttctttaatccagtatctgaggagttttgtctgcagctcatcctgctacaacttcatgtcacacctggaaagcttacataggccaggggtggtggctcacgtctgtaatcccagtactctgggaggccgaggtgggcagatcacctgaggttaggagttcaagaccagcctggtcaacacggcgaaaccccgtctctactaaaaatacaaaaattagccaggtgtggtggcaggtgcctgtaatcctagctgctcaggggagactgaggcatgagaatcgcttgaacctgggagagggaggttgcagtgagctgagatcacgtcactgcactccagcctgggggatagagagaggctctgtctccaaaaaaaaaatacaaaaaattagccaggcatggtagcttatgcctgtaatcccagctacctgggaggctgtggtaggagaatcacttgaacccaggaggaggaggttgcagggagccaagattgtgccattgcactccagcctgggcaaaaagagcaaaagtctgtcaaaaagggaagggaaggggaggggaagggaggggaggggagggaagggaaggttacatagatgtgaaagtgaactgccagccatgagcaacaaatccgagtgacatgtcttcttcatggtcctgacacggacgcgtgggttcgatctgacagcagcctgtgccatcatagctactgctcatgcatgcattcggggtgcccaaagtgatgctgaggggggcattcctagattcaaccctccaggagaccatgaggaggctggtgcgatagcgcaatcagatgaagacgcctgggctgcacaggggccactgcaagtgaagactcaagaggccaagctgactcccagaggctagggccactaaggtgggtgccgaggcaggggccaggctgggaacatgagaggccatttgggtagggagataagttccgtgagtgagggccaagggtctgacctcctagtgtggctggagaagcagagacaacagagtgcaaaaagagaaatgggccaggcgaggccatctggcaacgcactgcccaccctccattgcgtgcctctggctgcaaaaacaggcaggatcttccggccggtttgcccgccactcaccttccgagcatgcgcaccctccgagattgccaggaattgacttctctgtggccaatgaggtgccgcgttcctccaggctcatccaatgaacttatccgatgcttttgcatccaccaatggggtttcgagtgctgtgtggccaggctggcccggccttgcgtcgtaagagaatgccaagcccggggagaaggcgttccgggcctcaactttggcgtcgtgagattcttgtgaggcgtctgcctggaagccggcagcaattttgcttctttaaagagaaaaagaaggctagggactcagattcctggattctgaggaaagagaaggctggggacccagatcctggctctgaggggaacgagggttgggggcctgggctcccgggcctgagagggaggggaccagaatggtgtgtcccgcaggaaaaggtggttggaacccagactcctcgatccctacataggacggggctgggctctcagaatcccgggttctgatgaggctggggctggggctgggggccgagattctgggtccctgagagaatgtaagggacccctgagactgagggagaagcggccttcagggccacactcctgatcctgaagttggagggcactgggtggccgggcctgagaattaaaaccatgaaaaactggggcgtgataaacctgtgaactcgctccagctcacaagccggttagggacagaacgactttagaagtcgtggtcatatacaccataaaccccactgtgaggccgggcatcagggctcactcctggaatcccagcactatggggggacgaggcgggcagatcacctgagatcaggagttcgagaccagcctgaccaacatggtgaaacgtcatctctactaaaaatacaaaaaattcactgggtgtggtggcgggcacctgtaatcccggctactcgggaggctgaggcaggagaattgcttgaacctgataggcagaggcagtgagccgagattgcgccactgcactccagcctgggcgacagtgcaagactccgtctcaaaaaaaaaaaaaatgcagattaaaacaccccaccctgaagtcagtacttgccaggacctagatttgatctcatgcactctggctgaaaagttaattgccttctctccatcaaattcacagatccagaccagctcctcccagacctctccagaagaagccatgggaacccctcgtatccagcatttgctgatcctcctggtcctaggagcctccctcctgacctgtgcgtatgggggacataggggagagccgtgtgtcacagaaggtggactgatgatgaaaagggagccgccttggcccatggagaagtgcttatccttttcttgttttctcctcagcgggcctagagctgtattgtcaaaagggtctgtccatgactgtggaagcagatccagccaatatgtttaactggaccacagaggaagtggagacttgtgacaaaggggcactttgccaggaaaccatactaataattaaagcaggtgaaatgagatggggcatttgggctgggtaggagggaggttgattatctccatgccaatgcttgttcccttcgtccaggccaattgtgacggccaccatccatttcccctccttcctgtctcataacagggactgagacagccattttggccacgaagggctgcatcccggaaggggaggaggccataacaattgtccagcactcttcacctcccggcctgatcgtgacctcctacagtaactactgtgaggattccttctgtaatgacaaagacagcctgtctcagttttgggagttcagtgagaccacaggtaccctggaagtgggggagataggtactaagagaaactccataaagagcttgtgtatggcctccctttgcattctgacttggcttagcctaagtggtccataccccaaagtacctcacagttcaagtaattttatgtttctgaattgttcattgggatctaaacactgctcagagcagcgagataccagtgaagcctggagtgtaaactgggttttgtgtttattaagcaataagacaggctgggtgaggtggatcgcctgaggtcaggggtttgggaccagcttggccaacatggtgaaaacctgtctctactaaaaatacaaaaattagcttagcctggtggcgcacacctgtaatcccagatactcgggaagctgaggcaggagaattgcttgaacccaggaggcagaggttgcagtgagccaatatcacaccactgcacttcagcctgggacagagagcaagactccatcaaaaaaaaaaaaaaaaaaagcaataagacatcagtgtaggtttccgaacagggtggtattatcagtctaacaagtattggtttcccactgctgcacgagaacggcccagttccccaatttacaaggcctgtagtaacttggcccttcctgtcttttcagcttcatttccctctcttccctctctcatttactgtgtgctaactggggctaatactcaaaatgcttaacaatgtagatggcactggccaatcaaaatggattctggccataaaaaacaaaaacaaaaacaaaaaaaacagatcaaagaaacagctgggcctacaagctgaatatgagtcgtgcaacttctcacaattccctgaatccaccaagctggctcacaccacctgacctttgtccttgctgtttcctttactaccctccccaccccattttcacatagctaacccctgttcatcctccatgtcaattcaggtatcagctctttgaaaatatttgccaaattcttttaggtagttgggtattcctccattcctttgtcattataccttgaacacagcagctactgaattgattacttacatgtctttctcctaggcagagatgccaggtgacaggaactatgtccttttcatctctgtatcttcacacctcagcagagtttggaagtcagatcgatggagatttcacagcagagaacaccagctggggaaggatggggaggctgaagtaatgggccttgattagagtggcatctgcaggaaaatcttggggaagagaaggcagcaaggagcaacatctctggaggcaggacctgcccttaactgtctctctcatttccctccagcttccactgtgtcaacaaccctccattgtccaacctgtgtggctttggggacctgtttcagtgctccttctcttccctgtcccaatggtacaactcgatgctatcaaggaaaacttgagatcactggaggtaaactgaaatgaacatctgatagtttcagaggctggaaaaccatttgagtggctccccagagattctgacactgagctctccagggatgaggggggactggattctcctctgatgtcctaaaacatctctgtctctcccgatccttccttgttctataggtggcattgagtcgtctgtggaggtcaaaggctgtacagccatgattggctgcaggctgatgtctggaatcttagcagtaggacccatgtttgtgagggaagcgtgcccacatcagctgctcactcaacctcgaaagactgaaaatggggccacctgtcttcccattcctgtttgggggttacagctactgctgccattgctgctgccatcatttattcacttttcctaagaaggcacttctgggcctgggtctgaggacatcttttttgactgggagccttcttactgttgaggttcaacaagctgaggagtagatgggaatttgagggagaatacagagatactatgaacgtatttgacatttttaatacaatttctgctataatttttgtatgcagtaggcgttactaataaacatttctgctgtgatttgtgtatgtttcaacactagaagtggaattttagtgctgaaagagcctttaaaattcatcttctccaaaccacacattctccagaaagagaatctgagatctggaaaatttcagtgagtttcttacatttagctatggccagagccaaggcaagaacttacatattttgacgtaaagtctgattttcctttcactctaatatgctagctctccttgctagcagaagtaactagcattagcctcctccagaacactcccagcccaatcttaaggctgctgttttggggttctaaaatttccctaggaagtatggccaaatgagaaaaatcagactccaaattctccagttatgggcctgctgtagtggcttatacctgtaatcccagcactttgagaggcagaggtgggaggattgcatgagccaaggagtttgagaccagcctgggcaacctaatgagactacatctctacaaaaaaaaataatccaaaaattagcctggcatggtggcgctcgcctgtagtcccagctacttgggaggctgaagtgggatgatcacttatgtccacaaaaagagtcaaactctgtaaaatatttgaaaagatttattctgaaccaaatgtgagtgaccgtggtgtgtgacacagccctcaggagaccctgaaaacgtgcctaaggtggtcggggcacagcctagttttataccgtttaggaagacatgaggcaatcaaatacatgtaagatgtacattgtttcagtccagaaaggcaggacaactccaagtggaggaaacttccaggttataggtagattcaaaaattttctgattggccattggttaaaagagttattatctaaagacctggaatcagtagaaaggaatgtctgggttacgatgataagggattgtggaaaccaaagttttattacacaaatgaagccaccatgtcgcaggcttcagagagaatacattgtaaatgtttatcagacttaaggtctgtgttgatgttcatgctggtcagcttttcccaaaatccaaaagggaggcgggtatattgaggcatggccgactctcccttcccacagcatggcctgaaccagtttttcaggttaactttggaaagccctggctgagaggaggggacccttcagatggttgggggcggggagtggcttataattttattttttgtctgcacttgagctcaggaggttgaggctgcagtgagccatgatcatgcctctgtacttcagactggatgacagagtgagatcctctatcaaaacaaaaggcaaattctctcattacagtgggccccatttctctgtgtcctgtctatcccttgcctgctctacatcattccttcccttccctggggctgacttaatgactcttcagtggacttgggagggagggaggaaggattcattacagtatggtgaatggggacctgtgactacttgggcggcaaagatttttggaaaattctcatgcttattattactcaaaaatacataagctctatcttattgtaaaagactcaaatgatatcagaggtgtatagagcaaagtaaaaggtggggagggtaaaagggagacagatattttcttctaaaaaaaaaaaaaaaaacagctttactaagacttatctgacacacagtaaacggcaccagaggtggaaggagagacttttattacaaacacttgttcccctctcaaaagactggggagtttggccatagtatatatattccaaccaagttctttctagaaagttctctggttctacccactgagaaagggaaaaaaaaaatcttgggataccaaactcactatgctaaagggaaaagtcaggcttggga
